(19) United States
(12) Patent Application Publication
(10) Pub. No.: US 2018/0312545 A1
(43) Pub. Date: Nov. 1, 2018

(54) OPTIMIZED NUCLEIC ACID MOLECULES

(71) Applicant: CureVac AG, Tübingen (DE)

(72) Inventors: Patrick BAUMHOF, Dusslingen (DE); Susanne RAUCH, Tübingen (DE); Aleksandra KOWALCZYK, Stuttgart (DE); Johannes LUTZ, Pliezhausen (DE); Edith JASNY, Tübingen (DE); Benjamin PETSCH, Tübingen (DE); Andreas THESS, Kusterdingen (DE); Thomas SCHLAKE, Gundelfingen (DE); Mariola FOTIN-MLECZEK, Sindelfingen (DE); Regina HEIDENREICH, Tübingen (DE); Sandra LAZZARO, Tübingen (DE); Fatma DÖNER, Tübingen (DE); Wolfgang GROSSE, Wannweil (DE)

(21) Appl. No.: 15/774,423

(22) PCT Filed: Nov. 9, 2016
(86) PCT No.: PCT/EP2016/077145

§ 371 Date: May 8, 2018

(30) Foreign Application Priority Data
Nov. 9, 2015 (EP) PCT/EP2015/002243
Nov. 20, 2015 (EP) PCT/EP2015/002327

(51) Int. Cl. C07K 14/005; C07K 14/205; A61K 39/145

(52) U.S. Cl. CPC C07K 14/005; C07K 14/205; A61K 2039/53; C12N 2760/16122; C12N 2760/16134; A61K 39/145

(57) ABSTRACT

The present invention provides optimized nucleic acid molecules, methods for optimization of nucleic acid molecules and uses of optimized nucleic acid molecules. A modular design principle is provided that is suitable to generate a nucleic acid, particularly mRNA, which is tailored for a respective application. The nucleic acid molecules of the present invention can be obtained by the versatile combination of multiple modules on nucleic acid level. Such nucleic acid, e.g. mRNA, can be tailored by combining one or more modules, comprising (i) a nucleic acid moiety encoding a polypeptide of interest (e.g. a protein potentially producing a therapeutic outcome) and (ii) at least one further coding or non-coding nucleic acid moiety, e.g. selected among nucleic acid moieties encoding a polypeptide element, such as a secretory signal peptide (SSP), a multimerization element (dimerization, trimerization, tetramerization and oligomerization), a virus like particle (VLP) forming element, a transmembrane element, a dendritic cell targeting element, an immunological adjuvant element, an element promoting antigen presentation; a 2A peptide; a peptide linker element, elements that extend protein half-life, and/or any other polypeptide or protein. Non-coding nucleic acid moieties may be selected e.g. from the group comprising 3′-UTR, 5′-UTR, IRES element, miRNA moiety, histone stem loop, poly(C) sequence, polyadenylation signal, polyA-sequence. The optimized nucleic acid molecule can further be characterized by the presence of at least one modified nucleoside. The versatility of the present invention allows for rational design of a large variety of different nucleic acid molecules with desired properties.

[0001] The present invention concerns optimized nucleic acid molecules, methods for optimization of nucleic acid molecules and uses of optimized nucleic acid molecules, as well as biological entities comprising optimized nucleic acid molecules. Various aspects relating to optimization and to optimized nucleic acid molecules are subject of the present invention.

[0002] In general, deoxyribonucleic acid (DNA) and ribonucleic acid (RNA) are nucleic acid molecules which encode genetic information. In living cells of unicellular or multicellular organisms (in vivo), as well as in living cells isolated from multicellular organisms (in vitro), the encoded genetic information is translated into polypeptides and proteins by ribosomes. In vitro translation can also be achieved in cell-free systems comprising ribosomes, and appropriate reagents. These effects are standardly exploited in modern molecular biology, so that desired genetic information, in the form of DNA or RNA, can be added or provided to in vitro or in vivo environments containing ribosomes. In vivo uses in modern medicine include administration of nucleic acid molecules for therapeutic purposes, particularly in the context of gene therapy or genetic vaccination. The RNA species encoding the genetic information for translation into polypeptides and proteins by ribosomes is called messenger RNA (mRNA).

[0003] DNA is known to be relatively stable and easy to handle. However, the use of DNA bears the risk of undesired insertion of the administered DNA-fragments into the target cell's or target subject's (patient's) genome, potentially resulting mutagenic events such as in loss of function of the impaired genes. As a further risk of in vivo uses, the undesired generation of anti-DNA antibodies has emerged. Another drawback is the limited expression level of the encoded peptide or protein that is achievable upon DNA administration because the DNA must enter the nucleus in order to be transcribed before the resulting mRNA can be translated. Among other reasons, the expression level of the administered DNA will be dependent on the presence of specific transcription factors which regulate DNA transcription. In the absence of such factors, DNA transcription will not yield satisfying amounts of RNA. As a result, the level of translated peptide or protein obtained is limited.

[0004] By using RNA instead of DNA, the risk of undesired genomic integration and generation of anti-DNA antibodies is minimized or avoided. However, RNA has been traditionally considered to be a rather unstable molecular species which may readily be degraded by ubiquitous RNAses. Typically, RNA degradation contributes to the regulation of the RNA half-life time. That effect was considered and proven to fine tune the regulation of eukaryotic gene expression (Friedel et al., 2009. Conserved principles of mammalian transcriptional regulation revealed by RNA half-life, Nucleic Acid Research 37(17): 1-12). Accordingly, each naturally occurring mRNA has its individual half-life depending on the gene from which the mRNA is derived and in which cell type it is expressed. It contributes to the regulation of the expression level of this gene. Unstable RNAs are important to realize transient gene expression at distinct points in time. However, long-lived RNAs may be associated with accumulation of distinct proteins or continuous expression of genes. In vivo, the half-life of mRNAs may also be dependent on environmental factors, such as hormonal treatment, as has been shown, e.g., for insulin-like growth factor I, actin, and albumin mRNA (Johnson et al., Newly synthesized RNA: Simultaneous measurement in intact cells of transcription rates and RNA stability of insulin-like growth factor I, actin, and albumin in growth hormone-stimulated hepatocytes, Proc. Natl. Acad. Sci., Vol. 88, pp. 5287-5291, 1991).

[0005] For gene therapy and genetic vaccination, usually stable RNA is desired. This is, on the one hand, due to the fact that it is usually desired that the product encoded by the RNA sequence accumulates in vivo. On the other hand, the RNA has to maintain its structural and functional integrity when prepared for a suitable dosage form, in the course of its storage, and when administered. Thus, efforts were made to provide stable RNA molecules for gene therapy or genetic vaccination in order to prevent them from being subject to early degradation or decay.

[0006] It has been reported that the G/C-content of nucleic acid molecules may influence their stability. Thus, nucleic acids comprising an increased amount of guanine (G) and/or cytosine (C) residues may be functionally more stable than nucleic acids containing a large amount of adenine (A) and thymine (T) or uracil (U) nucleotides. In this context, WO02/098443 provides a pharmaceutical composition containing an mRNA that is stabilised by sequence modifications in the coding region. Such a sequence modification takes advantage of the degeneracy of the genetic code. Accordingly, codons which contain a less favourable combination of nucleotides (less favourable in terms of RNA stability) may be substituted by alternative codons without altering the encoded amino acid sequence. This method of RNA stabilization is limited by the provisions of the specific nucleotide sequence of each single RNA molecule which is not allowed to leave the space of the desired amino acid sequence. Also, that approach is restricted to coding regions of the RNA.

[0007] As an alternative option for mRNA stabilisation, it has been found that naturally occurring eukaryotic mRNA molecules contain characteristic stabilising moieties. For example, they may comprise so-called untranslated regions (UTR) at their 5′-end (5′-UTR) and/or at their 3′-end (3′-UTR) as well as other structural features, such as a 5′-cap structure or a 3′-poly(A) tail. Both, 5′-UTR and 3′-UTR are typically transcribed from the genomic DNA and are, thus, a feature of the premature mRNA. Characteristic structural features of mature mRNA, such as the 5′-cap and the 3′-poly(A) tail (also called poly(A) tail or poly(A) sequence) are usually added to the transcribed (premature) mRNA during mRNA processing.

[0008] A 3′-poly(A) tail is typically a monotonous sequence stretch of adenosine nucleotides added to the 3′-end of the transcribed mRNA. It may comprise up to about 400 adenosine nucleotides. It was found that the length of such a 3′-poly(A) tail is potentially critical for the stability of individual mRNA.

[0009] Also, it was shown that the 3′-UTR of α-globin mRNA may be an important factor for the well-known stability of α-globin mRNA (Rodgers et al., Regulated α-globin mRNA decay is a cytoplasmic event proceeding through 3′-to-5′ exosome-dependent decapping, RNA, 8, pp. 1526-1537, 2002). The 3′-UTR of α-globin mRNA is apparently involved in the formation of a specific ribonucleoprotein-complex, the α-complex, whose presence correlates with mRNA stability in vitro (Wang et al., An mRNA stability complex functions with poly(A)-binding protein to stabilize mRNA in vitro, Molecular and Cellular biology, Vol 19, No. 7, July 1999, p. 4552-4560).

[0010] An interesting regulatory function has further been demonstrated for the UTRs in ribosomal protein mRNAs: while the 5′-UTR of ribosomal protein mRNAs controls the growth-associated translation of the mRNA, the stringency of that regulation is conferred by the respective 3′-UTR in ribosomal protein mRNAs (Ledda et al., Effect of the 3′-UTR length on the translational regulation of 5′-terminal oligopyrimidine mRNAs, Gene, Vol. 344, 2005, p. 213-220). This mechanism contributes to the specific expression pattern of ribosomal proteins, which are typically transcribed in a constant manner so that some ribosomal protein mRNAs such as ribosomal protein S9 or ribosomal protein L32 are referred to as housekeeping genes (Janovick-Guretzky et al., Housekeeping Gene Expression in Bovine Liver is Affected by Physiological State, Feed Intake, and Dietary Treatment, J. Dairy Sci., Vol. 90, 2007, p. 2246-2252). The growth-associated expression pattern of ribosomal proteins is thus mainly due to regulation on the level of translation.

[0011] WO 2014/164253 A1 describes some specific nucleic acid molecules having 5′-UTRs and/or 3′-UTRs, without detailing on translation efficiency of such molecules.

[0012] Irrespective of factors influencing mRNA stability, effective translation of the administered nucleic acid molecules by the target cells or tissue is crucial for any approach using nucleic acid molecules for gene therapy or genetic vaccination. As can be seen from the examples cited above, along with the regulation of stability, also translation of the majority of mRNAs is regulated by structural features like UTRs, 5′-cap and 3′-poly(A) tail. In this context, it has been reported that the length of the poly(A) tail may play an important role for translation efficiency as well. Stabilizing 3′-moieties, however, may also have an attenuating effect on translation.

[0013] There is therefore a need for optimized nucleic acid molecules, particularly optimized RNA molecules, in general.

[0014] There is also a specific need for optimized nucleic acid molecules, particularly optimized RNA molecules, which are suitable for medical applications; particularly applications which involve the introduction of nucleic acids, such as DNA or RNA, into a subject's cell or tissue, followed by the translation of the information coded by the nucleic acids into the desired peptides or proteins. Beneficial characteristics of mRNA were discovered in the recent years and clinical development of mRNA-based therapeutics is in progress (reviewed in Sahin et al. 2014. Nat Rev Drug Discov. 2014 October; 13(10):759-80. doi: 10.1038/nrd4278. Epub 2014 Sep. 19; Kallen and Thess 2014. Ther Adv Vaccines. 2014 January; 2(1):10-31. doi: 10.1177/2051013613508729. Review).

[0015] In summary, mRNA represents a transient copy of the coded genetic information in all organisms. Hence, mRNA constructs may serve as a model for the synthesis of an unlimited variety of target proteins and, unlike DNA, represents all the necessary prerequisites for the preparation of a suitable vector for the transfer of exogenous genetic information in vivo.

[0016] It is an object of the invention to provide nucleic acid molecules which may be suitable for application in gene therapy and/or genetic vaccination. Particularly, it is the object of the invention to provide versatile RNA species which are stabilized against undesired degradation or decay. Another object of the present invention is to provide nucleic acid molecules coding for such a superior mRNA species which may be amenable for use in gene therapy and/or genetic vaccination. It is a further object of the present invention to provide a pharmaceutical composition for use in gene therapy and/or genetic vaccination. In summary, it is the object of the present invention to provide improved nucleic acid species which overcome the above discussed disadvantages of the prior art by a cost-effective and straight-forward approach.

[0017] The object underlying the present invention is solved by the claimed subject matter. In particular, the inventors identified structural and functional aspects related to optimization of nucleic acid molecules, particularly RNA molecules. Such aspects are provided herein. The invention also provides a modular system for combining aspects of RNA molecules, particularly optimized RNA molecules. The present invention therefore allows the versatile combination of nucleic acid sequences, and thus provides numerous optimized RNA molecules based on the general principles disclosed herein. For example, mRNA constructs that may serve for information carriers in protein therapies can be designed in a way to obtain sufficient protein expression avoiding the activation of the immune system. In contrast, mRNA constructs that serve for information carriers in vaccination should be designed in a way to activate the immune system in the most efficient manner, that is e.g., to activate a strong cellular response for tumour vaccines or to induce a strong humoral response for prophylactic vaccines.

### Terms and Definitions

[0018] For the sake of clarity and readability the following definitions are provided. Any technical feature mentioned for these definitions may be read on each and every embodiment of the invention. Additional definitions and explanations may be specifically provided in the context of these embodiments.

[0019] Adaptive immune response: The adaptive immune response is typically understood to be an antigen-specific response of the immune system. Antigen specificity allows for the generation of responses that are tailored to specific pathogens or pathogen-infected cells. The ability to mount these tailored responses is usually maintained in the body by “memory cells”. Should a pathogen infect the body more than once, these specific memory cells are used to quickly eliminate it. In this context, the first step of an adaptive immune response is the activation of naïve antigen-specific T cells or different immune cells able to induce an antigen-specific immune response by antigen-presenting cells. This occurs in the lymphoid tissues and organs through which naïve T cells are constantly passing. The three cell types that may serve as antigen-presenting cells are dendritic cells, macrophages, and B cells. Each of these cells has a distinct function in eliciting immune responses. Dendritic cells may take up antigens by phagocytosis and macropinocytosis and may become stimulated by contact with e.g. a foreign antigen to migrate to the local lymphoid tissue, where they differentiate into mature dendritic cells. Macrophages ingest particulate antigens such as bacteria and are induced by infectious agents or other appropriate stimuli to express MHC molecules. The unique ability of B cells to bind and internalize soluble protein antigens via their receptors may also be important to induce T cells. MHC-molecules are, typically, responsible for presentation of an antigen to T-cells. Therein, presenting the antigen on MHC molecules leads to activation of T cells which induces their proliferation and differentiation into armed effector T cells. The most important function of effector T cells is the killing of infected cells by CD8+ cytotoxic T cells and the activation of macrophages by Th1 cells which together make up cell-mediated immunity, and the activation of B cells by both Th2 and Th1 cells to produce different classes of antibody, thus driving the humoral immune response. T cells recognize an antigen by their T cell receptors which do not recognize and bind the antigen directly, but instead recognize short peptide fragments e.g. of pathogen-derived protein antigens, e.g. so-called epitopes, which are bound to MHC molecules on the surfaces of other cells.

[0020] Adaptive immune system: The adaptive immune system is essentially dedicated to eliminate or prevent pathogenic growth. It typically regulates the adaptive immune response by providing the vertebrate immune system with the ability to recognize and remember specific pathogens (to generate immunity), and to mount stronger attacks each time the pathogen is encountered. The system is highly adaptable because of somatic hypermutation (a process of accelerated somatic mutations), and V(D)J recombination (an irreversible genetic recombination of antigen receptor gene segments). This mechanism allows a small number of genes to generate a vast number of different antigen receptors, which are then uniquely expressed on each individual lymphocyte. Because the gene rearrangement leads to an irreversible change in the DNA of each cell, all of the progeny (offspring) of such a cell will then inherit genes encoding the same receptor specificity, including the Memory B cells and Memory T cells that are the keys to long-lived specific immunity.

[0021] Adjuvant/adjuvant component: An adjuvant or an adjuvant component in the broadest sense is typically a pharmacological and/or immunological agent that may modify, e.g. enhance, the effect of other agents, such as a drug or vaccine. It is to be interpreted in a broad sense and refers to a broad spectrum of substances. Typically, these substances are able to increase the immunogenicity of antigens. For example, adjuvants may be recognized by the innate immune systems and, e.g., may elicit an innate immune response. “Adjuvants” typically do not elicit an adaptive immune response. Insofar, “adjuvants” do not qualify as antigens. Their mode of action is distinct from the effects triggered by antigens resulting in an adaptive immune response.

[0022] Antigen: In the context of the present invention “antigen” refers typically to a substance which may be recognized by the immune system, preferably by the adaptive immune system, and is capable of triggering an antigen-specific immune response, e.g. by formation of antibodies and/or antigen-specific T cells as part of an adaptive immune response. Typically, an antigen may be or may comprise a peptide or protein which may be presented by the MHC to T-cells. In the sense of the present invention an antigen may be the product of translation of a provided nucleic acid molecule, preferably an mRNA as defined herein. In this context, also fragments, variants and derivatives of peptides and proteins comprising at least one epitope are understood as antigens. In the context of the present invention, tumour antigens and pathogenic antigens as defined herein are particularly preferred.

[0023] Artificial nucleic acid molecule: An artificial nucleic acid molecule may typically be understood to be a nucleic acid molecule—e.g. DNA or RNA—that does not occur naturally. In other words, an artificial nucleic acid molecule may be understood as a non-natural nucleic acid molecule. Such nucleic acid molecule may be non-natural due to its individual sequence (which does not occur naturally) and/or due to other modifications, e.g. structural modifications of nucleotides which do not occur naturally. An artificial nucleic acid molecule may be a DNA molecule, an RNA molecule or a hybrid-molecule comprising DNA and RNA portions. Typically, artificial nucleic acid molecules may be designed and/or generated by genetic engineering methods to correspond to a desired artificial sequence of nucleotides (heterologous sequence). In this context an artificial sequence is usually a sequence that may not occur naturally, i.e. it differs from the wild-type sequence by at least one nucleotide. The term “wild-type” may be understood as a sequence occurring in nature. When any particular “artificial nucleic acid molecule” is described herein to be “based on” any particular wild-type nucleic acid molecule, then said artificial nucleic acid molecule differs from said wild-type nucleic acid molecule by at least one nucleotide. Further, the term “artificial nucleic acid molecule” is not restricted to mean “one single molecule” but is, typically, understood to comprise an ensemble of identical molecules. Accordingly, it may relate to a plurality of identical molecules contained in an aliquot. Optimized nucleic acid molecules, as described herein, fall under the term “artificial nucleic acid molecules”. Further properties of optimized nucleic acid molecules of the invention are described herein below.

[0024] Bicistronic RNA, multicistronic RNA: A bicistronic or multicistronic RNA is typically an RNA, preferably an mRNA that typically may have two (bicistronic) or more (multicistronic) open reading frames (ORF). An open reading frame in this context is a sequence of codons that is translatable into a peptide or protein.

[0025] Carrier/polymeric carrier: A carrier in the context of the invention is any compound that facilitates transport and/or complexation of another compound. Said other compound can be referred to as “cargo”. A polymeric carrier is typically a carrier that is formed of a polymeric molecule. A carrier may be associated to its cargo by covalent or non-covalent interaction. A carrier may transport nucleic acids, e.g. RNA or DNA, to the target cells. The carrier may—in some embodiments—be a cationic component.

[0026] Cationic component: The term “cationic component” typically refers to a charged molecule, which is positively charged (cation) at a pH value typically from 1 to 9, preferably at a pH value of or below 9 (e.g. from 5 to 9), of or below 8 (e.g. from 5 to 8), of or below 7 (e.g. from 5 to 7), most preferably at a physiological pH, e.g. from 7.3 to 7.4. Accordingly, a cationic component may be any positively charged compound or polymer, preferably a cationic peptide or protein which is positively charged under physiological conditions, particularly under physiological conditions in vivo. A “cationic peptide or protein” may contain at least one positively charged amino acid, or more than one positively charged amino acid, e.g. selected from Arg, His, Lys or Orn. Accordingly, “polycationic” components are also within the scope exhibiting more than one positive charge under the conditions given.

[0027] 5′-cap: A 5′-cap is an entity, typically a modified nucleotide entity, which generally “caps” the 5′-end of a mature mRNA. A 5′-cap may typically be formed by a modified nucleotide, particularly by a derivative of a guanine nucleotide. Preferably, the 5′-cap is linked to the 5′-terminus via a 5′-5′-triphosphate linkage. A 5′-cap may be methylated, e.g. m7GpppN, wherein N is the terminal 5′ nucleotide of the nucleic acid carrying the 5′-cap, typically the 5′-end of an RNA. Further examples of 5′cap structures include glyceryl, inverted deoxy abasic residue (moiety), 4′,5′ methylene nucleotide, 1-(beta-D-erythrofuranosyl) nucleotide, 4′-thio nucleotide, carbocyclic nucleotide, 1,5-anhydrohexitol nucleotide, L-nucleotides, alpha-nucleotide, modified base nucleotide, threo-pentofuranosyl nucleotide, acyclic 3′,4′-seco nucleotide, acyclic 3,4-dihydroxybutyl nucleotide, acyclic 3,5 dihydroxypentyl nucleotide, 3′-3′-inverted nucleotide moiety, 3′-3′-inverted abasic moiety, 3′-2′-inverted nucleotide moiety, 3′-2′-inverted abasic moiety, 1,4-butanediol phosphate, 3′-phosphoramidate, hexylphosphate, aminohexyl phosphate, 3′-phosphate, 3′phosphorothioate, phosphorodithioate, or bridging or non-bridging methylphosphonate moiety.

[0028] Cellular immunity/cellular immune response: Cellular immunity relates typically to the activation of macrophages, natural killer cells (NK), antigen-specific cytotoxic T-lymphocytes, and the release of various cytokines in response to an antigen. In more general terms, cellular immunity is not based on antibodies, but on the activation of cells of the immune system. Typically, a cellular immune response may be characterized e.g. by activating antigen-specific cytotoxic T-lymphocytes that are able to induce apoptosis in cells, e.g. specific immune cells like dendritic cells or other cells, displaying epitopes of foreign antigens on their surface. Such cells may be virus-infected or infected with intracellular bacteria, or cancer cells displaying tumor antigens. Further characteristics may be activation of macrophages and natural killer cells, enabling them to destroy pathogens and stimulation of cells to secrete a variety of cytokines that influence the function of other cells involved in adaptive immune responses and innate immune responses.

[0029] DNA: DNA is the usual abbreviation for deoxy-ribonucleic acid. It is a nucleic acid molecule, i.e. a polymer consisting of nucleotides. These nucleotides are usually deoxy-adenosine-monophosphate, deoxy-thymidine-monophosphate, deoxy-guanosine-monophosphate and deoxy-cytidine-monophosphate monomers which are—by themselves—composed of a sugar moiety (deoxyribose), a base moiety and a phosphate moiety, and polymerise by a characteristic backbone structure. The backbone structure is, typically, formed by phosphodiester bonds between the sugar moiety of the nucleotide, i.e. deoxyribose, of a first and a phosphate moiety of a second, adjacent monomer. The specific order of the monomers, i.e. the order of the bases linked to the sugar/phosphate-backbone, is called the DNA sequence. DNA may be single stranded or double stranded. In the double stranded form, the nucleotides of the first strand typically hybridize with the nucleotides of the second strand, e.g. by A/T-base-pairing and G/C-base-pairing.

[0030] Element: An element, as used herein, generally refers to a polypeptide sub-sequence. Typically, more than one polypeptide sub-sequences are arranged in linear order, so that several same or different sub-sequences or elements are typically present in a polypeptide sequence. Without limiting the technical content, the term “element” is used herein to refer to a module on polypeptide or protein level. This use reflects the general use in the art for polypeptide or protein elements, as illustrated e.g. by the well-known term “transmembrane element”. However, as used herein, the term “element” is not limited to those polypeptide or protein modules that have been termed “element” in the prior art, but generally refers to a polypeptide or protein sub-sequence or module, as defined herein. Typically, an element is encoded by a nucleic acid module (moiety), as defined herein.

[0031] Epitope: (also called “antigen determinant”) can be distinguished in T cell epitopes and B cell epitopes. T cell epitopes or parts of the proteins in the context of the present invention may comprise fragments preferably having a length of about 6 to about 20 or even more amino acids, e.g. fragments as processed and presented by MHC class I molecules, preferably having a length of about 8 to about 10 amino acids, e.g. 8, 9, or 10, (or even 11, or 12 amino acids), or fragments as processed and presented by MHC class II molecules, preferably having a length of about 13 or more amino acids, e.g. 13, 14, 15, 16, 17, 18, 19, 20 or even more amino acids, wherein these fragments may be selected from any part of the amino acid sequence. These fragments are typically recognized by T cells in form of a complex consisting of the peptide fragment and an MHC molecule, i.e. the fragments are typically not recognized in their native form. B cell epitopes are typically fragments located on the outer surface of (native) protein or peptide antigens as defined herein, preferably having 5 to 15 amino acids, more preferably having 5 to 12 amino acids, even more preferably having 6 to 9 amino acids, which may be recognized by antibodies, i.e. in their native form.

[0032] Such epitopes of proteins or peptides may furthermore be selected from any of the herein mentioned variants of such proteins or peptides. In this context antigenic determinants can be conformational or discontinuous epitopes which are composed of segments of the proteins or peptides as defined herein that are discontinuous in the amino acid sequence of the proteins or peptides as defined herein but are brought together in the three-dimensional structure or continuous or linear epitopes which are composed of a single polypeptide chain.

[0033] Fragment of a sequence: A fragment of a sequence may typically be a shorter portion of a full-length sequence of e.g. a nucleic acid molecule or an amino acid sequence. Accordingly, a fragment, typically, consists of a sequence that is identical to the corresponding stretch within the full-length sequence. A preferred fragment of a sequence in the context of the present invention, consists of a continuous stretch of entities, such as nucleotides or amino acids corresponding to a continuous stretch of entities in the molecule the fragment is derived from, which represents at least 5%, 10%, 20%, preferably at least 30%, more preferably at least 40%, more preferably at least 50%, even more preferably at least 60%, even more preferably at least 70%, and most preferably at least 80% of the total (i.e. full-length) molecule from which the fragment is derived.

[0034] G/C modified: A G/C-modified nucleic acid may typically be a nucleic acid, preferably an artificial nucleic acid molecule as defined herein, based on a modified wild-type sequence comprising a preferably increased number of guanosine and/or cytosine nucleotides as compared to the wild-type sequence. Such an increased number may be generated by substitution of codons containing adenosine or thymidine nucleotides by codons containing guanosine or cytosine nucleotides. If the enriched G/C content occurs in a coding region of DNA or RNA, it makes use of the degeneracy of the genetic code. Accordingly, the codon substitutions preferably do not alter the encoded amino acid residues, but exclusively increase the G/C content of the nucleic acid molecule. An artificial nucleic acid molecule, which is G/C modified and which therefore exhibits at least one superior property with respect to a non-G/C optimized nucleic acid molecule encoding the same polypeptide, is termed “optimized nucleic acid molecule”.

[0035] Gene therapy: Gene therapy may typically be understood to mean a treatment of a patient's body or isolated elements of a patient's body, for example isolated tissues/cells, by nucleic acids encoding a peptide or protein. It typically may comprise at least one of the steps of a) administration of a nucleic acid, preferably an optimized nucleic acid molecule as defined herein, directly to the patient—by any suitable administration route—or in vitro to isolated cells/tissues of the patient, which results in transfection of the patient's cells either in vivo/ex vivo or in vitro; b) transcription and/or translation of the introduced nucleic acid molecule; and optionally c) re-administration of isolated, transfected cells to the patient, if the nucleic acid has not been administered directly to the patient.

[0036] Genetic vaccination: Genetic vaccination may typically be understood to be vaccination by administration of a nucleic acid molecule encoding an antigen or an immunogen or fragments thereof. The nucleic acid molecule may be administered to a subject's body or to isolated cells of a subject. Upon transfection of certain cells of the body or upon transfection of the isolated cells, the antigen or immunogen may be expressed by those cells and subsequently presented to the immune system, eliciting an adaptive, i.e. antigen-specific immune response. Accordingly, genetic vaccination typically comprises at least one of the steps of a) administration of a nucleic acid, preferably an optimized nucleic acid molecule as defined herein, to a subject, preferably a patient, or to isolated cells of a subject, preferably a patient, which usually results in transfection of the subject's cells either in vivo or in vitro; b) transcription and/or translation of the introduced nucleic acid molecule; and optionally c) re-administration of isolated, transfected cells to the subject, preferably the patient, if the nucleic acid has not been administered directly to the patient.

[0037] Heterologous sequence: Two sequences are typically understood to be ‘heterologous’ if they are not derivable from the same gene. I.e., although heterologous sequences may be derivable from the same organism, they naturally (in nature) do not occur in the same nucleic acid molecule, such as in the same mRNA.

[0038] Humoral immunity/humoral immune response: Humoral immunity refers typically to antibody production and optionally to accessory processes accompanying antibody production. A humoral immune response may be typically characterized, e.g., by Th2 activation and cytokine production, germinal centre formation and isotype switching, affinity maturation and memory cell generation. Humoral immunity also typically may refer to the effector functions of antibodies, which include pathogen and toxin neutralization, classical complement activation, and opsonin promotion of phagocytosis and pathogen elimination.

[0039] Immunogen: In the context of the present invention an immunogen may be typically understood to be a compound that is able to stimulate an immune response. Preferably, an immunogen is a peptide, polypeptide, or protein. In a particularly preferred embodiment, an immunogen in the sense of the present invention is the product of translation of a provided nucleic acid molecule, preferably an optimized nucleic acid molecule as defined herein. Typically, an immunogen elicits at least an adaptive immune response.

[0040] Immunostimulatory composition: In the context of the invention, an immunostimulatory composition may be typically understood to be a composition containing at least one component which is able to induce an immune response or from which a component which is able to induce an immune response is derivable. Such immune response may be preferably an innate immune response or a combination of an adaptive and an innate immune response. Preferably, an immunostimulatory composition in the context of the invention contains at least one optimized nucleic acid molecule, more preferably an RNA, for example an mRNA molecule. The immunostimulatory component, such as the mRNA may be complexed with a suitable carrier. Thus, the immunostimulatory composition may comprise an mRNA/carrier-complex. Furthermore, the immunostimulatory composition may comprise an adjuvant and/or a suitable vehicle for the immunostimulatory component, such as the mRNA.

[0041] Immune response: An immune response may typically be a specific reaction of the adaptive immune system to a particular antigen (so called specific or adaptive immune response) or an unspecific reaction of the innate immune system (so called unspecific or innate immune response), or a combination thereof.

[0042] Immune system: The immune system may protect organisms from infection. If a pathogen succeeds in passing a physical barrier of an organism and enters this organism, the innate immune system provides an immediate, but non-specific response. If pathogens evade this innate response, vertebrates possess a second layer of protection, the adaptive immune system. Here, the immune system adapts its response during an infection to improve its recognition of the pathogen. This improved response is then retained after the pathogen has been eliminated, in the form of an immunological memory, and allows the adaptive immune system to mount faster and stronger attacks each time this pathogen is encountered. According to this, the immune system comprises the innate and the adaptive immune system. Each of these two parts typically contains so called humoral and cellular components.

[0043] Immunostimulatory RNA: An immunostimulatory RNA (isRNA) in the context of the invention may typically be an RNA that is able to induce an innate immune response. It usually does not have an open reading frame and thus does not provide a peptide-antigen or immunogen but elicits an immune response e.g. by binding to a specific kind of Toll-like-receptor (TLR) or other suitable receptors. However, of course also mRNAs having an open reading frame and coding for a peptide/protein may induce an innate immune response and, thus, may be immunostimulatory RNAs.

[0044] Innate immune system: The innate immune system, also known as non-specific (or unspecific) immune system, typically comprises the cells and mechanisms that defend the host from infection by other organisms in a non-specific manner. This means that the cells of the innate system may recognize and respond to pathogens in a generic way, but unlike the adaptive immune system, it does not confer long-lasting or protective immunity to the host. The innate immune system may be, e.g., activated by ligands of Toll-like receptors (TLRs) or other auxiliary substances such as lipopolysaccharides, TNF-alpha, CD40 ligand, or cytokines, monokines, lymphokines, interleukins or chemokines, IL-1, IL-2, IL-3, IL-4, IL-5, IL-6, IL-7, IL-8, IL-9, IL-10, IL-11, IL-12, IL-13, IL-14, IL-15, IL-16, IL-17, IL-18, IL-19, IL-20, IL-21, IL-22, IL-23, IL-24, IL-25, IL-26, IL-27, IL-28, IL-29, IL-30, IL-31, IL-32, IL-33, IFN-alpha, IFN-beta, IFN-gamma, GM-CSF, G-CSF, M-CSF, LT-beta, TNF-alpha, growth factors, and hGH, a ligand of human Toll-like receptor TLR1, TLR2, TLR3, TLR4, TLR5, TLR6, TLR7, TLR8, TLR9, TLR10, a ligand of murine Toll-like receptor TLR1, TLR2, TLR3, TLR4, TLR5, TLR6, TLR7, TLR8, TLR9, TLR10, TLR11, TLR12 or TLR13, a ligand of a NOD-like receptor, a ligand of a RIG-I like receptor, an immunostimulatory nucleic acid, an immunostimulatory RNA (isRNA), a CpG-DNA, an antibacterial agent, or an anti-viral agent. The pharmaceutical composition according to the present invention may comprise one or more such substances. Typically, a response of the innate immune system includes recruiting immune cells to sites of infection, through the production of chemical factors, including specialized chemical mediators, called cytokines; activation of the complement cascade; identification and removal of foreign substances present in organs, tissues, the blood and lymph, by specialized white blood cells; activation of the adaptive immune system; and/or acting as a physical and chemical barrier to infectious agents.

[0045] Cloning site: A cloning site is typically understood to be a segment of a nucleic acid molecule, which is suitable for insertion of a nucleic acid sequence, e.g., a nucleic acid sequence comprising an open reading frame. Insertion may be performed by any molecular biological method known to the one skilled in the art, e.g. by restriction and ligation. A cloning site typically comprises one or more restriction enzyme recognition sites (restriction sites). These one or more restrictions sites may be recognized by restriction enzymes which cleave the DNA at these sites. A cloning site which comprises more than one restriction site may also be termed a multiple cloning site (MCS) or a polylinker.

[0046] Module: A module, as used herein, generally refers to a polypeptide sub-sequence or a polynucleotide sub-sequence. A sub-sequence is a sequence forming part of a sequence. In the present invention, a modular design principle is provided that is suitable to generate a polypeptide sequence or a polynucleotide sequence comprising several (more than one) sub-sequences or modules. Typically, the respective sub-sequences are arranged in linear order. Thus, several same or different sub-sequences or modules are typically present in a polypeptide sequence or polynucleotide sequence, respectively. Without limiting the technical content, the term “moiety” is used herein to refer to a module on nucleic acid level, and the term “element” is used herein to refer to a module on polypeptide or protein level.

[0047] Moiety: A moiety, as used herein, generally refers to a polynucleotide sub-sequence. Typically, more than one polynucleotide sub-sequences are arranged in linear order, so that several same or different sub-sequences or moieties are typically present in a polynucleotide sequence. Without limiting the technical content, the term “moiety” is used herein to refer to a module on nucleic acid level. This is reflects the use of this term e.g. in the area of combinatorial chemistry, where said term is generally used to refer to one of the portions into which a given molecule can be (e.g. mentally) divided. Thus, herein, the term moiety refers to a portion of a nucleic acid molecule; the nucleic acid molecule can be (e.g. mentally) divided into several moieties. A moiety may encode a polypeptide or protein module (element), as defined herein, or may be a non-coding moiety.

[0048] Nucleic acid molecule: A nucleic acid molecule is a molecule comprising, preferably consisting of nucleic acid components. The term nucleic acid molecule preferably refers to DNA or RNA molecules. It is preferably used synonymous with the term “polynucleotide”. Preferably, a nucleic acid molecule is a polymer comprising or consisting of nucleotide monomers which are covalently linked to each other by phosphodiester-bonds of a sugar/phosphate-backbone. The term “nucleic acid molecule” also encompasses modified nucleic acid molecules, such as base-modified, sugar-modified or backbone-modified etc. DNA or RNA molecules.

[0049] Open reading frame: An open reading frame (ORF) in the context of the invention may typically be a sequence of several nucleotide triplets which may be translated into a peptide or protein. An open reading frame preferably contains a start codon, i.e. a combination of three subsequent nucleotides coding usually for the amino acid methionine (ATG), at its 5′-end and a subsequent region which usually exhibits a length which is a multiple of 3 nucleotides. An ORF is preferably terminated by a stop-codon (e.g., TAA, TAG, and TGA). Typically, this is the only stop-codon of the open reading frame. Thus, an open reading frame in the context of the present invention is preferably a nucleotide sequence, consisting of a number of nucleotides that may be divided by three, which starts with a start codon (e.g. ATG) and which preferably terminates with a stop codon (e.g., TAA, TGA, or TAG). The open reading frame may be isolated or it may be incorporated in a longer nucleic acid sequence, for example in a vector or an mRNA. An open reading frame may also be termed “protein coding region” or “coding sequence” (cds).

[0050] Optimized nucleic acid molecule: In general, an optimized nucleic acid molecule is a nucleic acid molecule not found in nature. In other words, it is an artificial nucleic acid molecule, i.e. not a wild-type nucleic acid molecule. The nucleic acid molecule of the present invention is distinguished from a wild-type nucleic acid molecule by at least one structural feature. The distinguishing structural feature is selected from sequence modifications and base modifications. As described herein below, a sequence modification alters the polynucleotide sequence with respect to a wild-type nucleic acid molecule. Such sequence modification is typically selected among an addition, a deletion, an insertion and a substitution of one or more nucleic acid residues, with respect to a wild-type nucleic acid molecule. More than one such sequence modifications can be present in an optimized nucleic acid molecule. As described in detail below, the optimized nucleic acid molecules of the present invention allow for the versatile combination of multiple polypeptide or protein elements, encoded by respective nucleic acid moieties. Thus, preferably, the optimized nucleic molecule of the present invention is characterized by at least one addition of one or more nucleic acid residues, in practice, addition of at least one nucleic acid moiety (coding or non-coding), as described herein. Said addition is preferably realized 5′ or 3′ with respect to a starting (e.g. wild-type) nucleic acid molecule. Base modification, as described below, means that at least one base of a nucleic acid or (deoxyribonucleic acid or ribonucleic acid) is altered. In any event, the at least one distinguishing structural feature provides—or contributes to—a functional property of the optimized nucleic acid molecule which is not exhibited by the non-optimized (wild-type) nucleic acid molecule.

[0051] Peptide: A peptide or oligopeptide or polypeptide is typically a polymer of at least two amino acid monomers, linked by peptide bonds. An oligopeptide typically contains less than 50 monomer units, although the term peptide or oligopeptide is not a disclaimer for molecules having more than 50 monomer units. Polypeptides typically have between 50 and 600 monomer units, although the term polypeptide is neither a disclaimer for molecules having more than 600 monomer units, nor for molecules having less than 50 monomer units. Large peptides, i.e. peptides typically having more than 50 monomer units, or even more than 600 monomer units, are also referred to as proteins.

[0052] Pharmaceutically effective amount: A pharmaceutically effective amount in the context of the invention is typically understood to be an amount that is sufficient to induce a pharmaceutical effect, such as an immune response, altering a pathological level of an expressed peptide or protein, or substituting a lacking gene product, e.g., in case of a pathological situation.

[0053] Protein: A protein typically comprises one or more peptides or polypeptides. A protein is typically folded into 3-dimensional form, which may be required for the protein to exert its biological function.

[0054] Poly(A) sequence: A poly(A) sequence, also called poly(A) tail or 3′-poly(A) tail, is typically understood to be a sequence of adenosine nucleotides, e.g., of up to about 400 adenosine nucleotides, e.g. from about 20 to about 400, preferably from about 50 to about 400, more preferably from about 50 to about 300, even more preferably from about 50 to about 250, most preferably from about 60 to about 250 adenosine nucleotides. A poly(A) sequence is typically located at the 3′end of an mRNA. In the context of the present invention, a poly(A) sequence may be located within an mRNA or any other nucleic acid molecule, such as, e.g., in a vector, for example, in a vector serving as template for the generation of an RNA, preferably an mRNA, e.g., by transcription of the vector.

[0055] Polyadenylation: Polyadenylation is typically understood to be the addition of a poly(A) sequence to a nucleic acid molecule, such as an RNA molecule, e.g. to a premature mRNA. Polyadenylation may be induced by a so called polyadenylation signal. This signal is preferably located within a stretch of nucleotides at the 3′-end of a nucleic acid molecule, such as an RNA molecule, to be polyadenylated. A polyadenylation signal typically comprises a hexamer consisting of adenine and uracil/thymine nucleotides, preferably the hexamer sequence AAUAAA. Other sequences, preferably hexamer sequences, are also conceivable. Polyadenylation typically occurs during processing of a pre-mRNA (also called premature-mRNA). Typically, RNA maturation (from pre-mRNA to mature mRNA) comprises the step of polyadenylation.

[0056] Restriction site: A restriction site, also termed restriction enzyme recognition site, is a nucleotide sequence recognized by a restriction enzyme. A restriction site is typically a short, preferably palindromic nucleotide sequence, e.g. a sequence comprising 4 to 8 nucleotides. A restriction site is preferably specifically recognized by a restriction enzyme. The restriction enzyme typically cleaves a nucleotide sequence comprising a restriction site at this site. In a double-stranded nucleotide sequence, such as a double-stranded DNA sequence, the restriction enzyme typically cuts both strands of the nucleotide sequence.

[0057] RNA, mRNA: RNA is the usual abbreviation for ribonucleic acid. It is a nucleic acid molecule, i.e. a polymer consisting of nucleotides. These nucleotides are usually adenosine-monophosphate, uridine-monophosphate, guanosine-monophosphate and cytidine-monophosphate monomers which are connected to each other along a so-called backbone. The backbone is formed by phosphodiester bonds between the sugar, i.e. ribose, of a first and a phosphate moiety of a second, adjacent monomer. The specific succession of the monomers is called the RNA-sequence. Usually RNA may be obtainable by transcription of a DNA-sequence, e.g., inside a cell. In eukaryotic cells, transcription is typically performed inside the nucleus or the mitochondria. Typically, transcription of DNA usually results in the so-called premature RNA which has to be processed into so-called messenger-RNA, usually abbreviated as mRNA. Processing of the premature RNA, e.g. in eukaryotic organisms, comprises a variety of different posttranscriptional-modifications such as splicing, 5′-capping, polyadenylation, export from the nucleus or the mitochondria and the like. The sum of these processes is also called maturation of RNA. The mature messenger RNA usually provides the nucleotide sequence that may be translated into an amino-acid sequence of a particular peptide or protein. Typically, a mature mRNA comprises a 5′-cap, a 5′-UTR, an open reading frame, a 3′-UTR and a poly(A) sequence. Aside from messenger RNA, several non-coding types of RNA exist which may be involved in regulation of transcription and/or translation.

[0058] Sequence of a nucleic acid molecule: The sequence of a nucleic acid molecule is typically understood to be the particular and individual order, i.e. the succession of its nucleotides. The sequence of a protein or peptide is typically understood to be the order, i.e. the succession of its amino acids.

[0059] Sequence identity: Two or more sequences are identical if they exhibit the same length and order of nucleotides or amino acids. The percentage of identity typically describes the extent to which two sequences are identical, i.e. it typically describes the percentage of nucleotides that correspond in their sequence position with identical nucleotides of a reference-sequence. For determination of the degree of identity, the sequences to be compared are considered to exhibit the same length, i.e. the length of the longest sequence of the sequences to be compared. This means that a first sequence consisting of 8 nucleotides is 80% identical to a second sequence consisting of 10 nucleotides comprising the first sequence. In other words, in the context of the present invention, identity of sequences preferably relates to the percentage of nucleotides of a sequence which have the same position in two or more sequences having the same length. Gaps are usually regarded as non-identical positions, irrespective of their actual position in an alignment.

[0060] Stabilized nucleic acid molecule: A stabilized nucleic acid molecule is a nucleic acid molecule, preferably a DNA or RNA molecule that is modified such, that it is more stable to disintegration or degradation, e.g., by environmental factors or enzymatic digest, such as by an exo- or endonuclease degradation, than the nucleic acid molecule without the modification. Preferably, a stabilized nucleic acid molecule in the context of the present invention is stabilized in a cell, such as a prokaryotic or eukaryotic cell, preferably in a mammalian cell, such as a human cell. The stabilization effect may also be exerted outside of cells, e.g. in a buffer solution etc., for example, in a manufacturing process for a pharmaceutical composition comprising the stabilized nucleic acid molecule.

[0061] Transfection: The term “transfection” refers to the introduction of nucleic acid molecules, such as DNA or RNA (e.g. mRNA) molecules, into cells, preferably into eukaryotic cells. In the context of the present invention, the term “transfection” encompasses any method known to the skilled person for introducing nucleic acid molecules into cells, preferably into eukaryotic cells, such as into mammalian cells. Such methods encompass, for example, electroporation, lipofection, e.g. based on cationic lipids and/or liposomes, calcium phosphate precipitation, nanoparticle based transfection, virus based transfection, or transfection based on cationic polymers, such as DEAE-dextran or polyethylenimine etc. Preferably, the introduction is non-viral.

[0062] Vaccine: A vaccine is typically understood to be a prophylactic or therapeutic material providing at least one antigen, preferably an immunogen. The antigen or immunogen may be derived from any material that is suitable for vaccination. For example, the antigen or immunogen may be derived from a pathogen, such as from bacteria or virus particles etc., or from a tumor or cancerous tissue. The antigen or immunogen stimulates the body's adaptive immune system to provide an adaptive immune response.

[0063] Vector: The term “vector” refers to a nucleic acid molecule, preferably to an artificial nucleic acid molecule. A vector in the context of the present invention is suitable for incorporating or harbouring a desired nucleic acid sequence, such as preferably an optimized nucleic acid molecule as described herein, comprising at least one open reading frame (ORF). Such vectors may be storage vectors, expression vectors, cloning vectors, transfer vectors etc. A storage vector is a vector which allows the convenient storage of a nucleic acid molecule, for example, of an mRNA molecule. Thus, the vector may comprise a sequence corresponding, e.g., to a desired mRNA sequence or a part thereof, such as a sequence corresponding to the open reading frame and the 3′-UTR and/or the 5′-UTR of an mRNA. An expression vector may be used for production of expression products such as RNA, e.g. mRNA, or peptides, polypeptides or proteins. For example, an expression vector may comprise sequences needed for transcription of a sequence stretch of the vector, such as a promoter sequence, e.g. an RNA polymerase promoter sequence. A cloning vector is typically a vector that contains a cloning site, which may be used to incorporate nucleic acid sequences into the vector. A cloning vector may be, e.g., a plasmid vector or a bacteriophage vector. A transfer vector may be a vector which is suitable for transferring nucleic acid molecules into cells or organisms, for example, viral vectors. A vector in the context of the present invention may be, e.g., an RNA vector or a DNA vector. Preferably, a vector is a DNA molecule. Preferably, a vector in the sense of the present invention comprises a cloning site, a selection marker, such as an antibiotic resistance factor, and a sequence suitable for multiplication of the vector, such as an origin of replication. Preferably, a vector in the context of the present invention is a plasmid vector.

[0064] Vehicle: A vehicle is typically understood to be a material that is suitable for storing, transporting, and/or administering a compound, such as a pharmaceutically active compound. For example, it may be a physiologically acceptable liquid which is suitable for storing, transporting, and/or administering a pharmaceutically active compound.

[0065] 3′-untranslated region (3′-UTR): Generally, the term “3′-UTR” refers to a part of the artificial nucleic acid molecule of the invention, which is located 3′ (i.e. “downstream”) of an open reading frame and which is not translated into protein. Typically, a 3′-UTR is the part of an mRNA which is located between the protein coding region (open reading frame (ORF) or coding sequence (CDS)) and the poly(A) sequence of the mRNA. In the context of the present invention, a 3′-UTR is suitably comprised in the optimized nucleic acid molecule. The term 3′-UTR may also comprise moieties, which are not encoded in the template, from which an RNA is transcribed, but which are added after transcription during maturation, e.g. a poly(A) sequence. A 3′-UTR of the mRNA is not translated into an amino acid sequence. The 3′-UTR sequence is generally encoded by the gene which is transcribed into the respective mRNA during the gene expression process. The genomic sequence is first transcribed into pre-mature mRNA, which comprises optional introns. The pre-mature mRNA is then further processed into mature mRNA in a maturation process. This maturation process comprises the steps of 5′capping, splicing the pre-mature mRNA to excise optional introns and modifications of the 3′-end, such as polyadenylation of the 3′-end of the pre-mature mRNA and optional endo-/or exonuclease cleavages etc. In the context of the present invention, a 3′-UTR corresponds to the sequence of a mature mRNA which is located between the stop codon of the protein coding region, preferably immediately 3′ to the stop codon of the protein coding region, and the poly(A) sequence of the mRNA. The term “corresponds to” means that the 3′-UTR sequence may be an RNA sequence, such as in the mRNA sequence used for defining the 3′-UTR sequence, or a DNA sequence which corresponds to such RNA sequence. In the context of the present invention, the term “a 3′-UTR of a gene”, is the sequence which corresponds to the 3′-UTR of the mature mRNA derived from this gene, i.e. the mRNA obtained by transcription of the gene and maturation of the pre-mature mRNA. The term “3′-UTR of a gene” encompasses the DNA sequence and the RNA sequence (both sense and antisense strand and both mature and immature) of the 3′-UTR. Preferably, the 3′UTRs have a length of more than 20, 30, 40 or 50 nucleotides.

[0066] 5′-untranslated region (5′-UTR): Generally, the term “5′-UTR” refers to a part of the artificial nucleic acid molecule, which is located 5′ (i.e. “upstream”) of an open reading frame (ORF) and which is not translated into protein. A 5′-UTR is typically understood to be a particular section of messenger RNA (mRNA), which is located 5′ of the open reading frame of the mRNA. In the context of the present invention, a 5′-UTR is preferably present 5′ of an open reading frame encoding a polypeptide comprising a polypeptide of interest. Typically, the 5′-UTR starts with the transcriptional start site and ends one nucleotide before the start codon of the open reading frame. Preferably, the 5′UTRs have a length of more than 20, 30, 40 or 50 nucleotides. The 5′-UTR may comprise moieties for controlling gene expression, also called regulatory moieties. Such regulatory moieties may be, for example, ribosomal binding sites. The 5′-UTR may be posttranscriptionally modified, for example by addition of a 5′-CAP. A 5′-UTR of the mRNA is not translated into an amino acid sequence. The 5′-UTR sequence is generally encoded by the gene which is transcribed into the respective mRNA during the gene expression process. The genomic sequence is first transcribed into pre-mature mRNA, which comprises optional introns. The pre-mature mRNA is then further processed into mature mRNA in a maturation process. This maturation process comprises the steps of 5′capping, splicing the pre-mature mRNA to excise optional introns and modifications of the 3′-end, such as polyadenylation of the 3′-end of the pre-mature mRNA and optional endo-/or exonuclease cleavages etc. In the context of the present invention, a 5′-UTR corresponds to the sequence of a mature mRNA which is located between the start codon and, for example, the 5′-CAP. Preferably, the 5′-UTR corresponds to the sequence which extends from a nucleotide located 3′ to the 5′-CAP, more preferably from the nucleotide located immediately 3′ to the 5′-CAP, to a nucleotide located 5′ to the start codon of the protein coding region, preferably to the nucleotide located immediately 5′ to the start codon of the protein coding region. The nucleotide located immediately 3′ to the 5′-CAP of a mature mRNA typically corresponds to the transcriptional start site. The term “corresponds to” means that the 5′-UTR sequence may be an RNA sequence, such as in the mRNA sequence used for defining the 5′-UTR sequence, or a DNA sequence which corresponds to such RNA sequence. In the context of the present invention, the term “a 5′-UTR of a gene” is the sequence which corresponds to the 5′-UTR of the mature mRNA derived from this gene, i.e. the mRNA obtained by transcription of the gene and maturation of the pre-mature mRNA. The term “5′-UTR of a gene” encompasses the DNA sequence and the RNA sequence (both sense and antisense strand and both mature and immature) of the 5′-UTR.

[0067] 5′Terminal Oligopyrimidine Tract (TOP): The 5′terminal oligopyrimidine tract (TOP) is typically a stretch of pyrimidine nucleotides located in the 5′ terminal region of a nucleic acid molecule, such as the 5′ terminal region of certain mRNA molecules or the 5′ terminal region of a functional entity, e.g. the transcribed region, of certain genes. The sequence starts with a cytidine, which usually corresponds to the transcriptional start site, and is followed by a stretch of usually about 3 to 30 pyrimidine nucleotides. For example, the TOP may comprise 3, 4, 5, 6, 7, 8, 9, 10, 11, 12, 13, 14, 15, 16, 17, 18, 19, 20, 21, 22, 23, 24, 25, 26, 27, 28, 29, 30 or even more nucleotides. The pyrimidine stretch and thus the 5′ TOP ends one nucleotide 5′ to the first purine nucleotide located downstream of the TOP. Messenger RNA that contains a 5′terminal oligopyrimidine tract is often referred to as TOP mRNA. Accordingly, genes that provide such messenger RNAs are referred to as TOP genes. TOP sequences have, for example, been found in genes and mRNAs encoding peptide elongation factors and ribosomal proteins.

[0068] TOP motif: In the context of the present invention, a TOP motif is a nucleic acid sequence which corresponds to a 5′TOP as defined above. Thus, a TOP motif in the context of the present invention is preferably a stretch of pyrimidine nucleotides having a length of 3-30 nucleotides. Preferably, the TOP-motif consists of at least 3 pyrimidine nucleotides, preferably at least 4 pyrimidine nucleotides, preferably at least 5 pyrimidine nucleotides, more preferably at least 6 nucleotides, more preferably at least 7 nucleotides, most preferably at least 8 pyrimidine nucleotides, wherein the stretch of pyrimidine nucleotides preferably starts at its 5′end with a cytosine nucleotide. In TOP genes and TOP mRNAs, the TOP-motif preferably starts at its 5′end with the transcriptional start site and ends one nucleotide 5′ to the first purin residue in said gene or mRNA. A TOP motif in the sense of the present invention is preferably located at the 5′end of a sequence which represents a 5′-UTR or at the 5′end of a sequence which codes for a 5′-UTR. Thus, preferably, a stretch of 3 or more pyrimidine nucleotides is called “TOP motif” in the sense of the present invention if this stretch is located at the 5′end of a respective sequence, such as an artificial nucleic acid molecule (e.g. the optimized nucleic acid molecule of the present invention), the 5′-UTR moiety of said artificial nucleic acid molecule, or the nucleic acid sequence which is derived from the 5′-UTR of a TOP gene as described herein. In other words, a stretch of 3 or more pyrimidine nucleotides, which is not located at the 5′-end of a 5′-UTR or a 5′-UTR moiety but anywhere within a 5′-UTR or a 5′-UTR moiety, is preferably not referred to as “TOP motif”.

[0069] TOP gene: TOP genes are typically characterised by the presence of a 5′ terminal oligopyrimidine tract. Furthermore, most TOP genes are characterized by a growth-associated translational regulation. However, also TOP genes with a tissue specific translational regulation are known. As defined above, the 5′-UTR of a TOP gene corresponds to the sequence of a 5′-UTR of a mature mRNA derived from a TOP gene, which preferably extends from the nucleotide located 3′ to the 5′-CAP to the nucleotide located 5′ to the start codon. A 5′-UTR of a TOP gene typically does not comprise any start codons, preferably no upstream AUGs (uAUGs) or upstream open reading frames (uORFs). Therein, upstream AUGs and upstream open reading frames are typically understood to be AUGs and open reading frames that occur 5′ of the start codon (AUG) of the open reading frame that should be translated. The 5′-UTRs of TOP genes are generally rather short. The lengths of 5′-UTRs of TOP genes may vary between 20 nucleotides up to 500 nucleotides, and are typically less than about 200 nucleotides, preferably less than about 150 nucleotides, more preferably less than about 100 nucleotides. Exemplary 5′-UTRs of TOP genes in the sense of the present invention are the nucleic acid sequences extending from the nucleotide at position 5 to the nucleotide located immediately 5′ to the start codon (e.g. the ATG) in the sequences according to SEQ ID NOs. 1-1363 of the patent application WO2013/143700, whose disclosure is incorporated herewith by reference. In this context a particularly preferred fragment of a 5′-UTR of a TOP gene is a 5′-UTR of a TOP gene lacking the 5′TOP motif. The terms “5′-UTR of a TOP gene” or “5′-TOP UTR” preferably refer to the 5′-UTR of a naturally occurring TOP gene. A preferred example is represented by SEQ ID NO: 1674 (5′-UTR of human ribosomal protein Large 32 lacking the 5′ terminal oligopyrimidine tract); corresponding to SEQ ID NO. 1368 of the patent application WO2013/143700).

[0070] Wild-type, e.g. wild-type nucleic acid molecule: The term “wild-type” may be understood as a sequence occurring in nature. A wild-type nucleic molecule may typically be understood to be a nucleic acid molecule—e.g. a DNA or an RNA—that occurs naturally. In other words, a wild-type nucleic acid molecule may be understood as a natural nucleic acid molecule. Such nucleic acid molecule may be natural due to its individual sequence (which occurs naturally) and/or due to other modifications, e.g. structural modifications of nucleotides which occur naturally. A wild-type nucleic acid molecule may be a DNA molecule, an RNA molecule or a hybrid-molecule comprising DNA and RNA portions. Herein, the term “wild-type” refers to any sequence as long as it occurs in nature, reflection in publically accessible sequence collections such as GenBank is not required. The National Institute of Health (NIH) provides a publically accessible, annotated collection of publicly available nucleotide sequences (“GenBank”, accessible through the NCBI Entrez retrieval system: http://www.ncbi.nlm.nih.gov), (Nucleic Acids Research, 2013; 41(D1):D36-42), including publicly available wild-type sequences. Each GenBank record is assigned a unique constant identifier called an accession number and appears on the ACCESSION line of a GenBank record; and changes to the sequence data are tracked by an integer extension of the accession number which appears on the VERSION line of the GenBank record. Further, the term “wild-type nucleic acid molecule” is not restricted to mean “one single molecule” but is, typically, understood to comprise an ensemble of identical molecules. Accordingly, it may relate to a plurality of identical molecules contained in an aliquot. The optimized nucleic acid molecules of the present invention are preferably not wild-type nucleic acid molecules.

### DETAILED DESCRIPTION

[0071] The present invention concerns optimized nucleic acid molecules, methods for optimization of nucleic acid molecules and uses of optimized nucleic acid molecules, as well as biological entities comprising optimized nucleic acid molecules. In general, an optimized nucleic acid molecule is a nucleic acid molecule not found in nature. In other words, it is an artificial nucleic acid molecule, i.e. not a wild-type nucleic acid molecule. In the broadest sense, an optimized nucleic acid molecule of the present invention is superior to a naturally occurring nucleic acid molecule. Various aspects relating to optimization are subject of the present invention, as detailed herein.

[0072] The nucleic acid molecule of the present invention is distinguished from a wild-type nucleic acid molecule by at least one structural feature. The distinguishing structural feature is selected from sequence features (addition, deletion, insertion and/or substitution of one or more nucleotide, with respect to a wild-type nucleic acid molecule) and nucleoside modifications (altered natural or non-natural nucleotide in at least one position).

[0073] In the present invention, a modular design principle is provided that is suitable to generate an mRNA construct tailored for a respective medical application. Thus, the optimized nucleic acid molecules of the present invention allow for the versatile combination of multiple moieties or elements.

[0074] In general, the present invention relates to a nucleic acid molecule comprising at least two modules, and wherein at least one module is an open reading frame (ORF) encoding a polypeptide or protein of interest, and wherein at least one module is selected from (i) a further module encoding a polypeptide or protein element (coding module) and (ii) a module not encoding a polypeptide or protein element (non-coding module). For reference purposes, the at least two modules can be numbered, e.g. first module, second module . . . . For example, a first module can be an open reading frame (ORF) encoding a polypeptide or protein of interest, and a second module can be selected from (i) a further module encoding a polypeptide or protein element (coding module) and (ii) a module not encoding a polypeptide or protein element (non-coding module). The terms first and second do not imply a specific arrangement; thus, the first module can be located either 5′ Upstream) or 3′ (downstream) of the second module.

[0075] Each module is a nucleic acid moiety. Without limiting the technical content, the term “moiety” is used herein to refer to a unit, or building block, or sub-sequence, on nucleic acid level, and the term “element” is used herein to refer to a unit, or building block, or sub-sequence on polypeptide or protein level. When a nucleic acid molecule comprises multiple (two or more) moieties, said moieties are arranged in linear order (5′ to 3′) and linked to each other by a nucleosidic bond, thereby forming a modular nucleic acid molecule. If a polypeptide or protein molecule comprises multiple (two or more) elements, said elements are arranged in linear order (from N-terminus to C-terminus), and linked to each other by a peptide bond, thereby forming a modular polypeptide or protein. Such modular polypeptide or protein comprises multiple elements in linear order, with respect to the polypeptide strand.

[0076] In this entire specification, when the word “comprising” or “comprises” is used with reference to an item or a group of items, this usually means that additional items are optionally present. For example, a protein comprising two specific elements can optionally comprise one or more further elements in addition to the two specific elements. However, in specific more defined embodiments of the present invention, the word “comprising” or “comprises” has a more narrow meaning, i.e. synonymous to “consisting of” or “consists of”, thereby excluding the optional presence of additional (non-specified) items.

[0077] By the present invention, versatility is provided by modular design on nucleic acid level. In particular, for proteins or polypeptides comprised of more than one polypeptide or protein element, the coding region can be designed or tailored on nucleic acid level. A tailored or designed nucleic acid molecule, e.g. RNA, e.g. mRNA, consists of several moieties, each consisting of a nucleic acid sub-sequence. The tailored or designed nucleic acid molecule comprises (i) at least one nucleic acid moiety encoding at least one polypeptide of interest (e.g. a protein potentially producing a therapeutic outcome) and (ii) preferably at least one further nucleic acid moiety. Said further nucleic acid moiety may be selected among coding moieties and non-coding moieties. More than one of such moieties can be present in an optimized nucleic acid molecule. Thus, preferably, the optimized nucleic acid molecule of the present invention is characterized by addition of at least one nucleic acid moiety (coding or non-coding), as described herein. Said addition is preferably realized 5′ or 3′ with respect to a starting (e.g. wild-type) nucleic acid molecule. In the case of a further coding moiety, said coding moiety encodes for an element conferring a feature that is beneficial in the context of the polypeptide of interest, e.g. for an envisaged therapeutic application. Such further elements may be selected among a secretory signal peptide (SSP), a multimerization element, a virus like particle (VLP) forming element, a transmembrane element, a dendritic cell targeting element, an immunological adjuvant element, an element promoting antigen presentation; a 2A peptide; a peptide linker element, an element directing post-translational modification (e.g. glycosylation), and/or any other polypeptide or protein. Further non-coding moieties are selected from the group comprising 3′-UTR, 5′-UTR, IRES, miRNA binding site, histone stem loop, poly(A)-sequence and/or any other polynucleotide moiety. The polypeptide or protein element of interest may for example be selected from the group comprising therapeutic proteins, therapeutic polypeptides, allergens, autoimmune antigens, pathogenic antigens, and tumour antigens.

[0078] Alternatively or additionally (preferably additionally), the optimized nucleic acid molecule is (also) characterized by the presence of at least one chemical modification, e.g. at least one modified nucleoside. In such case, at least one nucleoside (deoxyribonucleoside or ribonucleoside) is altered. In any event, the chemical modification is a structural feature of such optimized nucleic acid molecule.

[0079] In any event, the at least one distinguishing structural feature provides—or contributes to—a functional property of the optimized nucleic acid molecule which is not exhibited by the non-optimized (wild-type) nucleic acid molecule. Without limitation, such functional properties can be selected from the list comprising improved or increased RNA stability, improved or directed RNA localization, improved or increased RNA lifetime, improved or increased translation of the RNA, improved or increased stability of the encoded polypeptide or protein, tissue- or target cell-specific expression of the encoded polypeptide or protein, improved or target-compartment directed localization of the encoded polypeptide or protein, such as localization at a membrane or in soluble form, in a particular cell organelle, at the cell surface, in excreted form, and the like. Functional properties also include properties associated with multimerization or particle formation of the polypeptide. Further, functional properties may include an added function, such as mediated by a fusion protein, wherein the added function is provided by a second polypeptide element. For such purposes, the nucleic acid moiety encoding second polypeptide is fused in frame with respect to the polypeptide of interest. Any two or more such functional properties may be exhibited by an optimized nucleic acid molecule of the present invention.

[0080] 1. Type of Nucleic Acid Molecule of the Present Invention

[0081] The optimized nucleic acid molecule according to the present invention may be RNA, such as mRNA or viral RNA or a replicon, DNA, such as a DNA plasmid or viral DNA, or may be a modified RNA or DNA molecule. It may be provided as a double-stranded molecule having a sense strand and an anti-sense strand, for example, as a DNA molecule having a sense strand and an anti-sense strand.

[0082] In one embodiment, the invention provides an optimized nucleic acid molecule which is a DNA molecule. Such nucleic acid molecule may serve as a template for an RNA molecule, preferably for an mRNA molecule. In other words, the optimized nucleic acid molecule may be a DNA which may be used as a template for production of an RNA e.g. an mRNA or a replicon. An mRNA is preferable. The obtainable RNA, may, in turn, be translated for production of a desired peptide or protein encoded by the open reading frame. If the optimized nucleic acid molecule is a DNA, it may, for example, be used as a double-stranded storage form for continued and repetitive in vitro or in vivo production of RNA e.g. mRNA.

[0083] In all aspects of the present invention, RNA is the preferred nucleic acid molecule. Thus, in an alternative, and preferred, embodiment, the nucleic acid molecule of the invention is an RNA molecule. RNA molecules may be obtainable by transcription from a DNA molecule according to the present invention. Alternatively, RNA molecules may also be obtainable in vitro by common methods of chemical synthesis, without being necessarily transcribed from a DNA progenitor.

[0084] RNA has numerous advantages over DNA as the nucleic acid for a genetic vehicle, including:

[0085] i) The RNA introduced into the cell does not integrate into the genome (whereas DNA does integrate into the genome to a certain degree and can also be inserted into an intact gene of the genome of the host cell, causing a mutation of the respective gene, which can lead to a partial or total loss of the genetic information or to misinformation).

[0086] ii) No viral sequences, such as promoters etc., are required for the effective transcription of RNA (whereas a strong promoter (e.g. the viral CMV promoter) is required for the expression of DNA introduced into the cell). The integration of such promoters into the genome of the host cell can lead to undesirable changes in the regulation of gene expression.

[0087] iii) The degradation of RNA that has been introduced takes place in a limited period of time, so that it is possible to achieve transient gene expression, which can be discontinued after the required treatment period (whereas this is not possible in the case of DNA that has been integrated into the genome).

[0088] iv) RNA does not lead to the induction of pathogenic anti-RNA antibodies in the patient (whereas the induction of anti-DNA antibodies is known to cause an undesirable immune response).

[0089] v) RNA is widely applicable; any desired RNA for any desired protein of interest can be prepared in short period of time for therapeutic purposes, even on an individual patient basis (personalized medicine).

[0090] As described in detail below, the RNA molecule preferably comprises at least one further coding or non-coding moiety, such as an untranslated region (UTR). Thus, the invention provides an optimized RNA molecule, preferably an artificial mRNA molecule or an artificial viral RNA molecule.

[0091] Preferably, the RNA of the present invention is messenger RNA (mRNA), i.e. RNA encoding at least one polypeptide or protein. An “mRNA species”, as used herein, corresponds to a genomic transcription unit.

[0092] 2. Modules (Coding and Non-Coding Nucleic Acid Moieties)

[0093] It is a key feature of the present invention that the optimized nucleic acid molecule can be designed by combination of more than one nucleic acid moieties. Without limiting the technical content, the term “moiety” or “nucleic acid moiety” is used herein to refer to a unit, or building block, on nucleic acid level, and the term “element” or “polypeptide element” or “polypeptide or protein element” is used herein to refer to a unit, or building block, on polypeptide or protein level.

[0094] The present invention allows to incorporate and recombine desired coding and non-coding moieties into a single nucleic acid molecule. At least one such moiety is a coding moiety, i.e. a nucleic acid moiety encoding a polypeptide element or protein element. Whether any particular moiety is desired or not depends on the circumstances. For example, if multimerization of an encoded polypeptide is intended, a multimerization element is a desired element of the encoded polypeptide, and thus the nucleic acid sequence coding therefor is a desired moiety of an optimized nucleic acid encoding such polypeptide capable of multimerization, and so on. Based on the common general knowledge and together with the information provided herein, the skilled person will recognize suitability of individual nucleic acid moieties, e.g. encoding polypeptide or protein elements, for the purposes of any particular optimized nucleic acid molecule in the context of the present invention.

[0095] Suitable moieties can generally be selected from coding moieties and from non-coding moieties. However, as the purpose of a nucleic acid molecule in the context of the present invention is typically the provision of genetic information encoding a polypeptide or protein, at least one coding moiety is typically comprised.

[0096] In accordance with the modular nature, the polynucleotide of the present invention is preferably artificial or chimeric. A chimeric molecule, e.g. polynucleotide, comprises typically sequence information originating from more than one protein and/or from more than one species.

[0097] Methods of generating nucleic acid molecules comprising several moieties are known to the person skilled in the art and include, without limitation, in vitro synthesis and molecular biological approaches, e.g. enzymatic linkage of nucleic acid fragments by the help of ligase enzymes.

[0098] 2.1 List of Elements Encoded by the Nucleic Acid Moieties of the Present Invention

[0099] Coding moieties can be selected from nucleic acid sequences encoding one or more polypeptides from the following list:
[0100] a nucleic acid sequence encoding a polypeptide or protein of interest;
[0101] a nucleic acid sequence encoding a secretory signal peptide (SSP);
[0102] a nucleic acid sequence encoding a multimerization element including dimerization, trimerization, tetramerization or oligomerization elements;
[0103] a nucleic acid sequence encoding a virus like particle (VLP) forming element;
[0104] a nucleic acid sequence encoding a transmembrane element;
[0105] a nucleic acid sequence encoding a dendritic cell targeting element;
[0106] a nucleic acid sequence encoding an immunological adjuvant element;
[0107] a nucleic acid sequence encoding an element promoting antigen presentation;
[0108] a nucleic acid sequence encoding a 2A peptide;
[0109] a nucleic acid sequence encoding a peptide linker element;
[0110] an elements that extends protein half-life;
[0111] a nucleic acid sequence encoding an element for post-translational modification (e.g. glycosylation)
[0112] and/or
[0113] any other nucleic acid sequence encoding a polypeptide or protein.

[0114] While the above list provides items in the singular form, it is equally possible that more than one respective moiety is selected. Moieties not included in the above list may equally be selected. Preferably, at least one moiety is from the above list.

[0115] The above are generic terms for the polypeptide/protein elements encoded by the respective nucleic acid moieties. Specific elements falling under these generic terms are also provided by the present invention. Details of elements from the above list, including sequences pertaining to specific embodiments, are provided below.

[0116] Herein, “a polypeptide or protein of interest” is any polypeptide or protein that is of interest for the desired purpose. Alternatively, a polypeptide or protein of interest can be referred to herein as target protein/polypeptide For example, when the purpose is vaccination against a certain antigen, a polypeptide or protein of interest is a polypeptide or protein which possesses the respective antigenic determinant. Preferably, the nucleic acid molecule of the present invention comprises at least one moiety encoding a polypeptide or protein of interest, and optionally additionally one or more further moiety encoding a further element from the above list. When the nucleic acid molecule encodes at least one additional polypeptide or protein element, it is preferable that the at least one additional polypeptide or protein element is encoded in the same reading frame as the polypeptide or protein of interest. Proteins or polypeptides encoded by that type of nucleic acids are also referred to as fusion proteins. Thus, preferably, the nucleic acid molecule of the present invention comprises a fusion protein. A fusion protein can comprise two or more, three or more, four or more, five or more, six or more, seven or more, eight or more, nine or more, ten or more polypeptide elements or protein elements.

[0117] 2.2 List of Non-Coding Moieties of the Optimized Nucleic Acid Molecule

[0118] Non-coding moieties can be selected from nucleic acid sequences from one or more disclosed the following list:
[0119] a 5′-UTR;
[0120] a 3′-UTR;
[0121] a miRNA moiety;
[0122] a Cap;
[0123] a poly(C) sequence
[0124] a histone stem-loop sequence
[0125] a poly(A) sequence or a polyadenylation signal;
[0126] an IRES moiety
[0127] a hairpin moiety
[0128] moieties for RNA binding proteins
[0129] a moiety that prevents 3′-5′ degradation
[0130] moieties that regulate RNA decay rates

[0131] The above are generic terms. Specific moieties falling under these generic terms are also provided by the present invention. Details of moieties from the above list, including sequences pertaining to specific embodiments, are provided below.

[0132] While the above list provides items in the singular form, it is equally possible that more than one respective moiety is selected. Nucleic acid moieties not included in the above list may equally be selected. Preferably, at least one module or moiety is from the above list.

[0133] In typical embodiments, at least one 5′-UTR moiety and/or at least one 3′-UTR moiety is selected. Preferably, at least one 5′-UTR and at least one 3′-UTR is selected.

[0134] 2.3 Number of Coding Moieties and Number of Non-Coding Moieties

[0135] More than one coding moiety can be comprised in the optimized nucleic acid molecule, such as 2 coding moieties, 3 coding moieties, 4 coding moieties, 5 coding moieties, 6 coding moieties, 7 coding moieties, 8 coding moieties, 9 coding moieties, 10 coding moieties or more than 10 coding moieties. It is also possible that 2 to 10 coding moieties, 3 to 9 coding moieties, four to eight coding moieties, five to seven coding moieties are comprised. In case the coding moieties encode the respective polypeptide elements or protein elements in the same open reading frame, translation of said open reading frame will result in the expression of a fusion protein. Such a fusion protein can comprise the respective number of polypeptide or protein elements.

[0136] More than one non-coding moiety can be comprised, such as 2 non-coding moieties, 3 non-coding moieties, 4 non-coding moieties, 5 non-coding moieties, 6 non-coding moieties, 7 non-coding moieties, 8 non-coding moieties, 9 non-coding moieties, 10 non-coding moieties or more than 10 non-coding moieties. It is also possible that two to ten non-coding moieties, three to nine non-coding moieties, four to eight non-coding moieties, five to seven non-coding moieties are comprised. Typically, at least a 3′-UTR moiety and/or at least a 5′-UTR moiety are comprised.

[0137] 2.4 Combination of Coding Moieties and Non-Coding Moieties

[0138] In light with the disclosure herein, any combination of moieties (coding moieties and non-coding moieties) is possible. Guided by the disclosure herein, the skilled person can routinely select appropriate moieties.

[0139] Thereby, the present invention allows for the versatile combination and recombination of nucleic acid moieties, and thus of polypeptide/protein elements. Thereby, a nucleic acid which is fit for any given purpose, can be designed and prepared. In other words, an optimal nucleic acid for any given purpose can be designed and prepared. Since such optimal nucleic acid, or optimized nucleic acid, is provided by the present invention, the present invention concerns not only such nucleic acid as such, but also methods for their preparation and apparatuses for their preparation.

[0140] The present invention thus allows for versatile recombination of nucleic acid moieties for any given purpose. Versatility is achieved by combination of moieties (coding moieties and non-coding moieties) as disclosed herein.

[0141] 3. Details and Embodiments of Moieties of the Nucleic Acid Molecules of the Invention

[0142] Details and embodiments of these moieties are provided herein below.

[0143] The following provides specific sequences as illustrative examples. However, further sequences having same or similar or equivalent functions to the specific sequences used herein may be used as well. An equivalent function is a function with the same effect or function (qualitatively); the effect need not be quantitatively identical. For example any two secretory signal peptides are designated as “equivalent”, as long as each of them provides the function described herein for secretory signal peptides, even if—as the case may be—not at a quantitatively identical level.

[0144] Insofar as species origin is given for polypeptide or polynucleotide sequences in connection with specific sequences of elements or moieties below, this serves for purposes of information rather than limiting the invention to a particular purpose. For example, when a specific sequence is from mouse (Mus musculus), it can be used for all aspects of the present invention, including nucleic acids for therapy of humans. In other words, indication of the species origin is not limiting.

[0145] 3.1 Coding Modules

[0146] 3.1.1 Polypeptide or Protein of Interest

[0147] The polypeptide or protein of interest is not limited. Rather, in line with the general concept of the present invention, virtually any polypeptide or protein, or nucleic acid encoding such polypeptide or protein, can be used or employed. Non-limiting examples include proteins of human origin, proteins of animal origin, proteins of plant origin, proteins of protozoological origin, proteins of virus origin, proteins of bacterial or archaebacterial origin, chimeric proteins, artificial proteins. The polypeptide or protein is encoded by an open reading frame (ORF).

[0148] In some embodiments, the ORF does not encode a ribosomal protein of human or plant origin, in particular Arabidopsis origin, in particular does not encode human ribosomal protein S6 (RPS6), human ribosomal protein L36a-like (RPL36AL) or Arabidopsis ribosomal protein S16 (RPS16). In a further preferred embodiment, the open reading frame (ORF) does not encode ribosomal protein S6 (RPS6), ribosomal protein L36a-like (RPL36AL) or ribosomal protein S16 (RPS16) of whatever origin. In some embodiments, the open reading frame of the optimized nucleic acid molecule according to the present invention does not code for a reporter protein, e.g., a reporter protein selected from the group consisting of globin proteins (particularly beta-globin), luciferase protein, GFP proteins, glucuronidase proteins (particularly beta-glucuronidase) or variants thereof, for example, variants exhibiting at least 70% sequence identity to a globin protein, a luciferase protein, a GFP protein, or a glucuronidase protein.

[0149] In a preferred embodiment, the at least one open reading frame encodes a therapeutic protein or peptide. In another embodiment, an antigen is encoded by the at least one open reading frame, such as a pathogenic antigen, a tumour antigen, an allergenic antigen or an autoimmune antigen. In an alternative embodiment, an antibody or an antigen-specific T cell receptor or a fragment thereof is encoded by the at least one open reading frame of the optimized nucleic acid molecule according to the invention.

[0150] Specific examples of suitable polypeptides and proteins of interest include pathogenic antigens, tumour antigens, and therapeutic proteins. Such examples are described below.

[0151] 3.1.1.1 Therapeutic Proteins; Therapeutic Polypeptides

[0152] The protein or polypeptide may comprise or consist of a therapeutic protein, a fragment, variant or derivative of a protein or a peptide, which comprises a therapeutic protein or a fragment, variant or derivative thereof.

[0153] Therapeutic proteins as defined herein are peptides or proteins, which are beneficial for the treatment of any inherited or acquired disease or which improves the condition of an individual. Particularly, therapeutic proteins play an important role in the creation of therapeutic agents that could modify and repair genetic errors, destroy cancer cells or pathogen infected cells, treat immune system disorders, treat metabolic or endocrine disorders, among other functions. For instance, Erythropoietin (EPO), a protein hormone can be utilized in treating patients with erythrocyte deficiency, which is a common cause of kidney complications. Furthermore adjuvant proteins, therapeutic antibodies are encompassed by therapeutic proteins and also hormone replacement therapy which is e.g. used in the therapy of women in menopause. In more recent approaches, somatic cells of a patient are used to reprogram them into pluripotent stem cells, which replace the disputed stem cell therapy. Also these proteins used for reprogramming of somatic cells or used for differentiating of stem cells are defined herein as therapeutic proteins. Furthermore, therapeutic proteins may be used for other purposes, e.g. wound healing, tissue regeneration, angiogenesis, etc. Furthermore, antigen-specific B cell receptors and fragments and variants thereof are defined herein as therapeutic proteins.

[0154] Therefore therapeutic proteins can be used for various purposes including treatment of various diseases like e.g. infectious diseases, neoplasms (e.g. cancer or tumour diseases), diseases of the blood and blood-forming organs, endocrine, nutritional and metabolic diseases, diseases of the nervous system, diseases of the circulatory system, diseases of the respiratory system, diseases of the digestive system, diseases of the skin and subcutaneous tissue, diseases of the musculoskeletal system and connective tissue, and diseases of the genitourinary system, independently if they are inherited or acquired.

[0155] In this context, particularly preferred therapeutic proteins which can be used inter alia in the treatment of metabolic or endocrine disorders are selected from (in brackets the particular disease for which the therapeutic protein is used in the treatment): Acid sphingomyelinase (Niemann-Pick disease), Adipotide (obesity), Agalsidase-beta (human galactosidase A) (Fabry disease; prevents accumulation of lipids that could lead to renal and cardiovascular complications), Alglucosidase (Pompe disease (glycogen storage disease type II)), alpha-galactosidase A (alpha-GAL A, Agalsidase alpha) (Fabry disease), alpha-glucosidase (Glycogen storage disease (GSD), Morbus Pompe), alpha-L-iduronidase (mucopolysaccharidoses (MPS), Hurler syndrome, Scheie syndrome), alpha-N-acetylglucosaminidase (Sanfilippo syndrome), Amphiregulin (cancer, metabolic disorder), Angiopoietin ((Ang1, Ang2, Ang3, Ang4, ANGPTL2, ANGPTL3, ANGPTL4, ANGPTL5, ANGPTL6, ANGPTL7) (angiogenesis, stabilize vessels), Betacellulin (metabolic disorder), Beta-glucuronidase (Sly syndrome), Bone morphogenetic protein BMPs (BMP1, BMP2, BMP3, BMP4, BMP5, BMP6, BMP7, BMP8a, BMP8b, BMP10, BMP15) (regenerative effect, bone-related conditions, chronic kidney disease (CKD)), CLN6 protein (CLN6 disease—Atypical Late Infantile, Late Onset variant, Early Juvenile, Neuronal Ceroid Lipofuscinoses (NCL)), Epidermal growth factor (EGF) (wound healing, regulation of cell growth, proliferation, and differentiation), Epigen (metabolic disorder), Epiregulin (metabolic disorder), Fibroblast Growth Factor (FGF, FGF-1, FGF-2, FGF-3, FGF-4, FGF-5, FGF-6, FGF-7, FGF-8, FGF-9, FGF-10, FGF-11, FGF-12, FGF-13, FGF-14, FGF-16, FGF-17, FGF-17, FGF-18, FGF-19, FGF-20, FGF-21, FGF-22, FGF-23) (wound healing, angiogenesis, endocrine disorders, tissue regeneration), Galsulphase (Mucopolysaccharidosis VI), Ghrelin (irritable bowel syndrome (IBS), obesity, Prader-Willi syndrome, type II diabetes mellitus), Glucocerebrosidase (Gaucher's disease), GM-CSF (regenerative effect, production of white blood cells, cancer), Heparin-binding EGF-like growth factor (HB-EGF) (wound healing, cardiac hypertrophy and heart development and function), Hepatocyte growth factor HGF (regenerative effect, wound healing), Hepcidin (iron metabolism disorders, Beta-thalassemia), Human albumin (Decreased production of albumin (hypoproteinaemia), increased loss of albumin (nephrotic syndrome), hypovolaemia, hyperbilirubinaemia), Idursulphase (Iduronate-2-sulphatase) (Mucopolysaccharidosis II (Hunter syndrome)), Integrins αVβ3, αVβ5 and α5β1 (Bind matrix macromolecules and proteinases, angiogenesis), Iuduronate sulfatase (Hunter syndrome), Laronidase (Hurler and Hurler-Scheie forms of mucopolysaccharidosis I), N-acetylgalactosamine-4-sulfatase (rhASB; galsulfase, Arylsulfatase A (ARSA), Arylsulfatase B (ARSB)) (arylsulfatase B deficiency, Maroteaux-Lamy syndrome, mucopolysaccharidosis VI), N-acetylglucosamine-6-sulfatase (Sanfilippo syndrome), Nerve growth factor (NGF), Brain-Derived Neurotrophic Factor (BDNF), Neurotrophin-3 (NT-3), and Neurotrophin 4/5 (NT-4/5) (regenerative effect, cardiovascular diseases, coronary atherosclerosis, obesity, type 2 diabetes, metabolic syndrome, acute coronary syndromes, dementia, depression, schizophrenia, autism, Rett syndrome, anorexia nervosa, bulimia nervosa, wound healing, skin ulcers, corneal ulcers, Alzheimer's disease), Neuregulin (NRG1, NRG2, NRG3, NRG4) (metabolic disorder, schizophrenia), Neuropilin (NRP-1, NRP-2) (angiogenesis, axon guidance, cell survival, migration), Obestatin (irritable bowel syndrome (IBS), obesity, Prader-Willi syndrome, type II diabetes mellitus), Platelet Derived Growth factor (PDGF (PDFF-A, PDGF-B, PDGF-C, PDGF-D) (regenerative effect, wound healing, disorder in angiogenesis, Arteriosclerosis, Fibrosis, cancer), TGF beta receptors (endoglin, TGF-beta 1 receptor, TGF-beta 2 receptor, TGF-beta 3 receptor) (renal fibrosis, kidney disease, diabetes, ultimately end-stage renal disease (ESRD), angiogenesis), Thrombopoietin (THPO) (Megakaryocyte growth and development factor (MGDF)) (platelets disorders, platelets for donation, recovery of platelet counts after myelosuppressive chemotherapy), Transforming Growth factor (TGF (TGF-alpha, TGF-beta (TGFbeta1, TGFbeta2, and TGFbeta3))) (regenerative effect, wound healing, immunity, cancer, heart disease, diabetes, Marfan syndrome, Loeys-Dietz syndrome), VEGF (VEGF-A, VEGF-B, VEGF-C, VEGF-D, VEGF-E, VEGF-F and PIGF) (regenerative effect, angiogenesis, wound healing, cancer, permeability), Nesiritide (Acute decompensated congestive heart failure), Trypsin (Decubitus ulcer, varicose ulcer, debridement of eschar, dehiscent wound, sunburn, meconium ileus), adrenocorticotrophic hormone (ACTH) (“Addison's disease, Small cell carcinoma, Adrenoleukodystrophy, Congenital adrenal hyperplasia, Cushing's syndrome, Nelson's syndrome, Infantile spasms), Atrial-natriuretic peptide (ANP) (endocrine disorders), Cholecystokinin (diverse), Gastrin (hypogastrinemia), Leptin (Diabetes, hypertriglyceridemia, obesity), Oxytocin (stimulate breastfeeding, non-progression of parturition), Somatostatin (symptomatic treatment of carcinoid syndrome, acute variceal bleeding, and acromegaly, polycystic diseases of the liver and kidney, acromegaly and symptoms caused by neuroendocrine tumours), Vasopressin (antidiuretic hormone) (diabetes insipidus), Calcitonin (Postmenopausal osteoporosis, Hypercalcaemia, Paget's disease, Bone metastases, Phantom limb pain, Spinal Stenosis), Exenatide (Type 2 diabetes resistant to treatment with metformin and a sulphonylurea), Growth hormone (GH), somatotropin (Growth failure due to GH deficiency or chronic renal insufficiency, Prader-Willi syndrome, Turner syndrome, AIDS wasting or cachexia with antiviral therapy), Insulin (Diabetes mellitus, diabetic ketoacidosis, hyperkalaemia), Insulin-like growth factor 1 IGF-1 (Growth failure in children with GH gene deletion or severe primary IGF1 deficiency, neurodegenerative disease, cardiovascular diseases, heart failure), Mecasermin rinfabate, IGF-1 analog (Growth failure in children with GH gene deletion or severe primary IGF1 deficiency, neurodegenerative disease, cardiovascular diseases, heart failure), Mecasermin, IGF-1 analog (Growth failure in children with GH gene deletion or severe primary IGF1 deficiency, neurodegenerative disease, cardiovascular diseases, heart failure), Pegvisomant (Acromegaly), Pramlintide (Diabetes mellitus, in combination with insulin), Teriparatide (human parathyroid hormone residues 1-34) (Severe osteoporosis), Becaplermin (Debridement adjunct for diabetic ulcers), Dibotermin-alpha (Bone morphogenetic protein 2) (Spinal fusion surgery, bone injury repair), Histrelin acetate (gonadotropin releasing hormone; GnRH) (Precocious puberty), Octreotide (Acromegaly, symptomatic relief of VIP-secreting adenoma and metastatic carcinoid tumours), and Palifermin (keratinocyte growth factor; KGF) (Severe oral mucositis in patients undergoing chemotherapy, wound healing).

[0156] These and other proteins are understood to be therapeutic, as they are meant to treat the subject by replacing its defective endogenous production of a functional protein in sufficient amounts. Accordingly, such therapeutic proteins are typically mammalian, in particular human proteins.

[0157] For the treatment of blood disorders, diseases of the circulatory system, diseases of the respiratory system, cancer or tumour diseases, infectious diseases or immunodeficiencies following therapeutic proteins may be used: Alteplase (tissue plasminogen activator; tPA) (Pulmonary embolism, myocardial infarction, acute ischaemic stroke, occlusion of central venous access devices), Anistreplase (Thrombolysis), Antithrombin III (AT-III) (Hereditary AT-III deficiency, Thromboembolism), Bivalirudin (Reduce blood-clotting risk in coronary angioplasty and heparin-induced thrombocytopaenia), Darbepoetin-alpha (Treatment of anaemia in patients with chronic renal insufficiency and chronic renal failure (+/−dialysis)), Drotrecogin-alpha (activated protein C) (Severe sepsis with a high risk of death), Erythropoietin, Epoetin-alpha, erythropoetin, erthropoyetin (Anaemia of chronic disease, myleodysplasia, anaemia due to renal failure or chemotherapy, preoperative preparation), Factor IX (Haemophilia B), Factor Vila (Haemorrhage in patients with haemophilia A or B and inhibitors to factor VIII or factor IX), Factor VIII (Haemophilia A), Lepirudin (Heparin-induced thrombocytopaenia), Protein C concentrate (Venous thrombosis, Purpura fulminans), Reteplase (deletion mutein of tPA) (Management of acute myocardial infarction, improvement of ventricular function), Streptokinase (Acute evolving transmural myocardial infarction, pulmonary embolism, deep vein thrombosis, arterial thrombosis or embolism, occlusion of arteriovenous cannula), Tenecteplase (Acute myocardial infarction), Urokinase (Pulmonary embolism), Angiostatin (Cancer), Anti-CD22 immunotoxin (Relapsed CD33+ acute myeloid leukaemia), Denileukin diftitox (Cutaneous T-cell lymphoma (CTCL)), Immunocyanin (bladder and prostate cancer), MPS (Metallopanstimulin) (Cancer), Aflibercept (Non-small cell lung cancer (NSCLC), metastatic colorectal cancer (mCRC), hormone-refractory metastatic prostate cancer, wet macular degeneration), Endostatin (Cancer, inflammatory diseases like rheumatoid arthritis as well as Crohn's disease, diabetic retinopathy, psoriasis, and endometriosis), Collagenase (Debridement of chronic dermal ulcers and severely burned areas, Dupuytren's contracture, Peyronie's disease), Human deoxy-ribonuclease I, dornase (Cystic fibrosis; decreases respiratory tract infections in selected patients with FVC greater than 40% of predicted), Hyaluronidase (Used as an adjuvant to increase the absorption and dispersion of injected drugs, particularly anaesthetics in ophthalmic surgery and certain imaging agents), Papain (Debridement of necrotic tissue or liquefication of slough in acute and chronic lesions, such as pressure ulcers, varicose and diabetic ulcers, burns, postoperative wounds, pilonidal cyst wounds, carbuncles, and other wounds), L-Asparaginase (Acute lymphocytic leukaemia, which requires exogenous asparagine for proliferation), Peg-asparaginase (Acute lymphocytic leukaemia, which requires exogenous asparagine for proliferation), Rasburicase (Paediatric patients with leukaemia, lymphoma, and solid tumours who are undergoing anticancer therapy that may cause tumour lysis syndrome), Human chorionic gonadotropin (HCG) (Assisted reproduction), Human follicle-stimulating hormone (FSH) (Assisted reproduction), Lutropin-alpha (Infertility with luteinizing hormone deficiency), Prolactin (Hypoprolactinemia, serum prolactin deficiency, ovarian dysfunction in women, anxiety, arteriogenic erectile dysfunction, premature ejaculation, oligozoospermia, asthenospermia, hypofunction of seminal vesicles, hypoandrogenism in men), alpha-1-Proteinase inhibitor (Congenital antitrypsin deficiency), Lactase (Gas, bloating, cramps and diarrhoea due to inability to digest lactose), Pancreatic enzymes (lipase, amylase, protease) (Cystic fibrosis, chronic pancreatitis, pancreatic insufficiency, post-Billroth II gastric bypass surgery, pancreatic duct obstruction, steatorrhoea, poor digestion, gas, bloating), Adenosine deaminase (pegademase bovine, PEG-ADA) (Severe combined immunodeficiency disease due to adenosine deaminase deficiency), Abatacept (Rheumatoid arthritis (especially when refractory to TNFalpha inhibition)), Alefacept (Plaque Psoriasis), Anakinra (Rheumatoid arthritis), Etanercept (Rheumatoid arthritis, polyarticular-course juvenile rheumatoid arthritis, psoriatic arthritis, ankylosing spondylitis, plaque psoriasis, ankylosing spondylitis), Interleukin-1 (IL-1) receptor antagonist, Anakinra (inflammation and cartilage degradation associated with rheumatoid arthritis), Thymulin (neurodegenerative diseases, rheumatism, anorexia nervosa), TNF-alpha antagonist (autoimmune disorders such as rheumatoid arthritis, ankylosing spondylitis, Crohn's disease, psoriasis, hidradenitis suppurativa, refractory asthma), Enfuvirtide (HIV-1 infection), and Thymosin α1 (Hepatitis B and C). (In brackets is the particular disease for which a use of the therapeutic protein is indicated for treatment)

[0158] 3.1.1.2 Pathogenic Antigens:

[0159] The protein or a polypeptide of interest may consist or comprise of a pathogenic antigen or a fragment, variant or derivative thereof. Such pathogenic antigens are derived from pathogenic organisms, in particular bacterial, viral or protozoological pathogenic organisms, which evoke an immunological reaction in a subject, in particular a mammalian subject, more particularly a human. More specifically, pathogenic antigens are preferably surface antigens, e.g. proteins (or fragments of proteins, e.g. the exterior portion of a surface antigen) located at the surface of the virus or the bacterial or protozoological organism.

[0160] Pathogenic antigens are peptide or protein antigens preferably derived from a pathogen associated with infectious disease which are preferably selected from antigens derived from the pathogens Acinetobacter baumannii, Anaplasma genus, Anaplasma phagocytophilum, Ancylostoma braziliense, Ancylostoma duodenale, Arcanobacterium haemolyticum, Ascaris lumbricoides, Aspergillus genus, Astroviridae, Babesia genus, Bacillus anthracis, Bacillus cereus, Bartonella henselae, BK virus, Blastocystis hominis, Blastomyces dermatitidis, Bordetella pertussis, Borrelia burgdorferi, Borrelia genus, Borrelia spp, Brucella genus, Brugia malayi, Bunyaviridae family, Burkholderia cepacia and other Burkholderia species, Burkholderia mallei, Burkholderia pseudomallei, Caliciviridae family, Campylobacter genus, Candida albicans, Candida spp, Chlamydia trachomatis, Chlamydophila pneumoniae, Chlamydophila psittaci, CJD prion, Clonorchis sinensis, Clostridium botulinum, Clostridium difficile, Clostridium perfringens, Clostridium perfringens, Clostridium spp, Clostridium tetani, Coccidioides spp, coronaviruses, Corynebacterium diphtheriae, Coxiella burnetii, Crimean-Congo haemorrhagic fever virus, Cryptococcus neoformans, Cryptosporidium genus, Cytomegalovirus (CMV), Dengue viruses (DEN-1, DEN-2, DEN-3 and DEN-4), Dientamoeba fragilis, Ebolavirus (EBOV), Echinococcus genus, Ehrlichia chaffeensis, Ehrlichia ewingii, Ehrlichia genus, Entamoeba histolytica, Enterococcus genus, Enterovirus genus, Enteroviruses, mainly Coxsackie A virus and Enterovirus 71 (EV71), Epidermophyton spp, Epstein-Barr Virus (EBV), Escherichia coli O157:H7, O111 and O104:H4, Fasciola hepatica and Fasciola gigantica, FFI prion, Filarioidea superfamily, Flaviviruses, Francisella tularensis, Fusobacterium genus, Geotrichum candidum, Giardia intestinalis, Gnathostoma spp, GSS prion, Guanarito virus, Haemophilus ducreyi, Haemophilus influenzae, Helicobacter pylori, Henipavirus (Hendra virus Nipah virus), Hepatitis A Virus, Hepatitis B Virus (HBV), Hepatitis C Virus (HCV), Hepatitis D Virus, Hepatitis E Virus, Herpes simplex virus 1 and 2 (HSV-1 and HSV-2), Histoplasma capsulatum, HIV (Human immunodeficiency virus), Hortaea werneckii, Human bocavirus (HBoV), Human herpesvirus 6 (HHV-6) and Human herpesvirus 7 (HHV-7), Human metapneumovirus (hMPV), Human papillomavirus (HPV), Human parainfluenza viruses (HPIV), Japanese encephalitis virus, JC virus, Junin virus, Kingella kingae, Klebsiella granulomatis, Kuru prion, Lassa virus, Legionella pneumophila, Leishmania genus, Leptospira genus, Listeria monocytogenes, Lymphocytic choriomeningitis virus (LCMV), Machupo virus, Malassezia spp, Marburg virus, Measles virus, Metagonimus yokagawai, Microsporidia phylum, Molluscum contagiosum virus (MCV), Mumps virus, Mycobacterium leprae and Mycobacterium lepromatosis, Mycobacterium tuberculosis, Mycobacterium ulcerans, Mycoplasma pneumoniae, Naegleria fowleri, Necator americanus, Neisseria gonorrhoeae, Neisseria meningitidis, Nocardia asteroides, Nocardia spp, Onchocerca volvulus, Orientia tsutsugamushi, Orthomyxoviridae family (Influenza), Paracoccidioides brasiliensis, Paragonimus spp, Paragonimus westermani, Parvovirus B19, Pasteurella genus, Plasmodium genus, Pneumocystis jirovecii, Poliovirus, Rabies virus, Respiratory syncytial virus (RSV), Rhinovirus, rhinoviruses, Rickettsia akari, Rickettsia genus, Rickettsia prowazekii, Rickettsia rickettsii, Rickettsia typhi, Rift Valley fever virus, Rotavirus, Rubella virus, Sabia virus, Salmonella genus, Sarcoptes scabiei, SARS coronavirus, Schistosoma genus, Shigella genus, Sin Nombre virus, Hantavirus, Sporothrix schenckii, Staphylococcus genus, Staphylococcus genus, Streptococcus agalactiae, Streptococcus pneumoniae, Streptococcus pyogenes, Strongyloides stercoralis, Taenia genus, Taenia solium, Tick-borne encephalitis virus (TBEV), Toxocara canis or Toxocara cati, Toxoplasma gondii, Treponema pallidum, Trichinella spiralis, Trichomonas vaginalis, Trichophyton spp, Trichuris trichiura, Trypanosoma brucei, Trypanosoma cruzi, Ureaplasma urealyticum, Varicella zoster virus (VZV), Varicella zoster virus (VZV), Variola major or Variola minor, vCJD prion, Venezuelan equine encephalitis virus, Vibrio cholerae, West Nile virus, Western equine encephalitis virus, Wuchereria bancrofti, Yellow fever virus, Yersinia enterocolitica, Yersinia pestis, and Yersinia pseudotuberculosis.

[0161] In this context particularly preferred are antigens from the pathogens selected from Influenza virus, respiratory syncytial virus (RSV), Herpes simplex virus (HSV), human Papilloma virus (HPV), Human immunodeficiency virus (HIV), Plasmodium, Staphylococcus aureus, Dengue virus, Chlamydia trachomatis, Cytomegalovirus (CMV), Hepatitis B virus (HBV), Mycobacterium tuberculosis, Rabies virus, and Yellow Fever Virus.

[0162] 3.1.1.3 Tumour Antigens:

[0163] The protein or polypeptide may comprise or consist of a tumour antigen, a fragment, variant or derivative of a tumour antigen. Such nucleic acid molecules are particularly useful for therapeutic purposes, particularly genetic vaccination. Preferably, the tumour antigen is selected from the group comprising a melanocyte-specific antigen, a cancer-testis antigen or a tumour-specific antigen, preferably a CT-X antigen, a non-X CT-antigen, a binding partner for a CT-X antigen or a binding partner for a non-X CT-antigen or a tumour-specific antigen, more preferably a CT-X antigen, a binding partner for a non-X CT-antigen or a tumour-specific antigen or a fragment, variant or derivative of said tumour antigen; and wherein each of the nucleic acid sequences encodes a different peptide or protein; and wherein at least one of the nucleic acid sequences encodes for 5T4, 707-AP, 9D7, AFP, AlbZIP HPG1, alpha-5-beta-1-integrin, alpha-5-beta-6-integrin, alpha-actinin-4/m, alpha-methylacyl-coenzyme A racemase, ART-4, ARTC1/m, B7H4, BAGE-1, BCL-2, bcr/abl, beta-catenin/m, BING-4, BRCA1/m, BRCA2/m, CA 15-3/CA 27-29, CA 19-9, CA72-4, CA125, calreticulin, CAMEL, CASP-8/m, cathepsin B, cathepsin L, CD19, CD20, CD22, CD25, CDE30, CD33, CD4, CD52, CD55, CD56, CD80, CDC27/m, CDK4/m, CDKN2A/m, CEA, CLCA2, CML28, CML66, COA-1/m, coactosin-like protein, collage XXIII, COX-2, CT-9/BRD6, Cten, cyclin B1, cyclin D1, cyp-B, CYPB1, DAM-10, DAM-6, DEK-CAN, EFTUD2/m, EGFR, ELF2/m, EMMPRIN, EpCam, EphA2, EphA3, ErbB3, ETV6-AML1, EZH2, FGF-5, FN, Frau-1, G250, GAGE-1, GAGE-2, GAGE-3, GAGE-4, GAGE-5, GAGE-6, GAGE7b, GAGE-8, GDEP, GnT-V, gp100, GPC3, GPNMB/m, HAGE, HAST-2, hepsin, Her2/neu, HERV-K-MEL, HLA-A*0201-R17I, HLA-A11/m, HLA-A2/m, HNE, homeobox NKX3.1, HOM-TES-14/SCP-1, HOM-TES-85, HPV-E6, HPV-E7, HSP70-2M, HST-2, hTERT, iCE, IGF-1R, IL-13Ra2, IL-2R, IL-5, immature laminin receptor, kallikrein-2, kallikrein-4, Ki67, KIAA0205, KIAA0205/m, KK-LC-1, K-Ras/m, LAGE-A1 LDLR-FUT, MAGE-A1, MAGE-A2, MAGE-A3, MAGE-A4, MAGE-A6, MAGE-A9, MAGE-A10, MAGE-A12, MAGE-B1, MAGE-B2, MAGE-B3, MAGE-B4, MAGE-B5, MAGE-B6, MAGE-B10, MAGE-B16, MAGE-B17, MAGE-C1, MAGE-C2, MAGE-C3, MAGE-D1, MAGE-D2, MAGE-D4, MAGE-E1, MAGE-E2, MAGE-F1, MAGE-H1, MAGEL2, mammaglobin A, MART-1/melan-A, MART-2, MART-2/m, matrix protein 22, MC1R, M-CSF, ME1/m, mesothelin, MG50/PXDN, MMP11, MN/CA IX-antigen, MRP-3, MUC-1, MUC-2, MUM-1/m, MUM-2/m, MUM-3/m, myosin class I/m, NA88-A, N-acetylglucosaminyltransferase-V, Neo-PAP, Neo-PAP/m, NFYC/m, NGEP, NMP22, NPM/ALK, N-Ras/m, NSE, NY-ESO-1, NY-ESO-B, OA1, OFA-iLRP, OGT, OGT/m, OS-9, OS-9/m, osteocalcin, osteopontin, p15, p190 minor bcr-abl, p53, p53/m, PAGE-4, PAI-1, PAI-2, PAP, PART-1, PATE, PDEF, Pim-1-Kinase, Pin-1, Pml/PARalpha, POTE, PRAME, PRDX5/m, prostein, proteinase-3, PSA, PSCA, PSGR, PSM, PSMA, PTPRK/m, RAGE-1, RBAF600/m, RHAMM/CD168, RU1, RU2, S-100, SAGE, SART-1, SART-2, SART-3, SCC, SIRT2/m, Sp17, SSX-1, SSX-2/HOM-MEL-40, SSX-4, STAMP-1, STEAP-1, survivin, survivin-2B, SYT-SSX-1, SYT-SSX-2, TA-90, TAG-72, TARP, TEL-AML1, TGFbeta, TGFbetaRIl, TGM-4, TPI/m, TRAG-3, TRG, TRP-1, TRP-2/6b, TRP/INT2, TRP-p8, tyrosinase, UPA, VEGFR1, VEGFR-2/FLK-1, WT1 and a immunoglobulin idiotype of a lymphoid blood cell or a T cell receptor idiotype of a lymphoid blood cell, or a fragment, variant or derivative of said tumour antigen; preferably survivin or a homologue thereof, an antigen from the MAGE-family or a binding partner thereof or a fragment, variant or derivative of said tumour antigen. Particularly preferred in this context are the tumour antigens NY-ESO-1, 5T4, MAGE-C1, MAGE-C2, Survivin, Muc-1, PSA, PSMA, PSCA, STEAP and PAP.

[0164] 3.1.2 Secretory Signal Peptides:

[0165] Secretory signal peptides (abbreviated SSPs) are typically relatively short peptide stretches that promote the secretion of a protein polypeptide.

[0166] When used in combination with a polypeptide or protein of interest in the context of the present invention, such signal sequence is typically placed N-terminal to the polypeptide or protein of interest. On nucleic acid level, the coding sequence for such signal sequence is typically placed in frame (i.e. in the same reading frame), 5′ to the coding sequence for the polypeptide or protein of interest.

[0167] Preferred secretory signal sequences are those functional in eukaryotic cells.

[0168] In the eukaryotic cell, the secretory signal peptide is typically cleaved from the nascent polypeptide chain immediately after it has been translocated into the membrane of the endoplasmic reticulum. The translocation occurs co-translationally and is dependent on a cytoplasmic protein-RNA complex (signal recognition particle, SRP). Without wishing to be bound to any particular theory, within the endoplasmic reticulum, protein folding and certain post-translational modifications can occur (e.g., glycosylation). Then, the protein is typically transported into Golgi vesicles and eventually secreted.

[0169] There is no well-defined consensus sequence or sequence motif for signal peptides, but there is a common structure. Secretory signal sequences have a tripartite structure, consisting of a hydrophobic core region flanked by an n- and c-region. Typically, the n-region is one to five amino acids in length, carrying positively charged amino acids. Between the hydrophobic core region and the signal peptidase cleavage site is the c-region, which consists of three to seven polar, but mostly uncharged, amino acids. Close to the cleavage site a more specific pattern of amino acids, known as the (3,1)-rule, is found: the amino acid residues at positions 3 and 1 (relative to the cleavage site) must be small and neutral for cleavage to occur correctly. For target proteins such as antigens associated with infectious diseases, a proper secretion of the antigen is beneficial for the induction of an immune response, because secretion of the antigen mimics the “natural” way of a viral infection and cytoplasmic localization of the expressed antigenic peptides/proteins could strongly limit the exposure of antigens to professional immune cells required for an induction of a humoral immune response.

[0170] Secretory signal peptides (SSPs) may be used as additional elements to promote or improve the secretion of the target protein (protein of interest). Suitably, the polypeptide sequence of the SSP used in the present invention is selected from the following list of polypeptide sequences (SEQ ID NOs: 1-1115 and SEQ ID NO: 1728).

[0171] On nucleic acid level, particularly RNA level, any nucleotide sequence moiety can be employed that encodes any of SSP used in the present invention. In specific embodiments, such nucleotide sequence is selected to encode a polypeptide selected from the following list of polypeptide sequences SEQ ID NOs: 1-1115 and SEQ ID NO: 1728. Owing to the degenerated genetic code, in the case of most polypeptides SEQ ID NOs: 1-1115 and SEQ ID NO: 1728, more than one particular nucleic acid sequence is conceivable as encoding the respective polypeptide. While each and every such nucleic acid may generally be used in the context of the present invention, it is preferable that the nucleic acid sequence that encodes the polypeptide sequence is selected such that its sequence is codon-optimized according to the general guidance provided in this specification.

[0172] Alternatively, any polypeptide element may be selected which is characterized by at least 80% identity, at least 85% identity, preferably at least 90% identity, and more preferably at least 95% identity to any of the sequences SEQ ID NOs: 1-1115 and SEQ ID NO: 1728). On nucleic acid level, any polynucleotide (e.g. RNA) moiety may be selected which encodes such polypeptide element.

[0173] 3.1.3 Multimerization Elements

[0174] For target proteins, such as antigens associated with infectious diseases, multimerization of the encoded antigen may be beneficial for the induction of an immune response. Fusion of the target antigen to multimerization elements (e.g., dimerization elements, trimerization elements, tetramerization elements, and oligomerization elements) may lead to the formation of multimeric antigen-complexes. This potentially increases immunogenicity of the respective antigen because such antigen-complexes may mimic a “natural” infection with an exogenous pathogen (e.g., virus) where a plurality of potential antigens is commonly located at the envelope of the pathogen (e.g., hemagglutinin (HA) antigen of the influenza virus).

[0175] When used in combination with a polypeptide or protein of interest in the context of the present invention, such multimerization element can be placed N-terminal or C-terminal to the polypeptide of interest. On nucleic acid level, the coding sequence for such multimerization element is typically placed in frame (i.e. in the same reading frame), 5′ or 3′ to the coding sequence for the polypeptide or protein of interest.

[0176] Particular multimerization elements are oligomerization elements, tetramerization elements, trimerization elements or dimerization elements.

[0177] Dimerization elements may be selected from e.g. dimerization elements/domains of heat shock proteins, immunoglobulin Fc domains and leucine zippers (dimerization domains of the basic region leucine zipper class of transcription factors). Specific elements are provided in SEQ ID NOs. 1116-1120.

[0178] Trimerization and tetramerization elements may be selected from e.g. engineered leucine zippers (engineered α-helical coiled coil peptide that adopt a parallel trimeric state), fibritin foldon domain from enterobacteria phage T4, GCN4plI, GCN4-pLI, and p53. Specific elements are provided in SEQ ID NOs. 1121-1145 (trimerization elements) and SEQ ID NOs. 1146-1149 (tetramerization elements).

[0179] Oligomerization elements may be selected from e.g. ferritin, surfactant D, oligomerization domains of phosphoproteins of paramyxoviruses, complement inhibitor C4 binding protein (C4 bp) oligomerization domains, Viral infectivity factor (Vif) oligomerization domain, sterile alpha motif (SAM) domain, and von Willebrand factor type D domain.

[0180] Ferritin forms oligomers and is a highly conserved protein found in all animals, bacteria, and plants. Ferritin is a protein that spontaneously forms nanoparticles of 24 identical subunits. Ferritin-antigen fusion constructs potentially form oligomeric aggregates or “clusters” of antigens that may enhance the immune response.

[0181] Surfactant D protein (SPD) is a hydrophilic glycoprotein that spontaneously self-assembles to form oligomers. An SPD-antigen fusion constructs may form oligomeric aggregates or “clusters” of antigens that may enhance the immune response.

[0182] Phosphoprotein of paramyxoviruses (negative sense RNA viruses) functions as a transcriptional transactivator of the viral polymerase. Oligomerization of the phosphoprotein is critical for viral genome replication. A phosphoprotein-antigen fusion constructs may form oligomeric aggregates or “clusters” of antigens that may enhance the immune response.

[0183] Complement inhibitor C4 binding Protein (C4 bp) may also be used as a fusion partner to generate oligomeric antigen aggregates. The C-terminal domain of C4 bp (57 amino acid residues in humans and 54 amino acid residues in mice) is both necessary and sufficient for the oligomerization of C4 bp or other polypeptides fused to it. A C4 bp-antigen fusion constructs may form oligomeric aggregates or “clusters” of antigens that may enhance the immune response.

[0184] Viral infectivity factor (Vif) multimerization domain has been shown to form oligomers both in vitro and in vivo. The oligomerization of Vif involves a sequence mapping between residues 151 to 164 in the C-terminal domain, the 161PPLP164 motif (for human HIV-1: TPKKIKPPLP). A Vif-antigen fusion constructs may form oligomeric aggregates or “clusters” of antigens that may enhance the immune response.

[0185] The sterile alpha motif (SAM) domain is a protein interaction module present in a wide variety of proteins involved in many biological processes. The SAM domain that spreads over around 70 residues is found in diverse eukaryotic organisms. SAM domains have been shown to homo- and hetero-oligomerise, forming multiple self-association oligomeric architectures. A SAM-antigen fusion constructs may form oligomeric aggregates or “clusters” of antigens that may enhance the immune response.

[0186] von Willebrand factor (vWF) contains several type D domains: D1 and D2 are present within the N-terminal propeptide whereas the remaining D domains are required for oligomerization. The vWF domain is found in various plasma proteins: complement factors B, C2, CR3 and CR4; the Integrins (I-domains); collagen types VI, VII, XII and XIV; and other extracellular proteins. A vWF-antigen fusion constructs may form oligomeric aggregates or “clusters” of antigens that may enhance the immune response.

[0187] Specific elements suitable for oligomerization are provided in SEQ ID NOs. 1150-1167.

[0188] Multimerization elements useful in the present invention are provided in SEQ ID NOs: 1116-1167. Multimerization elements fused to respective target proteins (antigens) may be used to form antigen nanoparticles.

[0189] Suitably, the polypeptide sequence of the multimerization element used in the present invention is selected from the following list of polypeptide sequences (SEQ ID NOs: 1116-1167).

[0190] On nucleic acid level, particularly RNA level, any nucleotide sequence moiety can be employed that encodes any of oligomerization element used in the present invention. In specific embodiments, such nucleotide sequence is selected to encode a polypeptide selected from the following list of polypeptide sequences SEQ ID NOs: 1116-1167. Owing to the degenerated genetic code, in the case of most polypeptides SEQ ID NOs: 1116-1167, more than one particular nucleic acid sequence is conceivable as encoding the respective polypeptide. While each and every such nucleic acid may generally be used in the context of the present invention, it is preferable that the nucleic acid sequence that encodes the polypeptide sequence is selected such that its sequence is codon-optimized according to the general guidance provided in this specification.

[0191] Alternatively, any polypeptide element may be selected which is characterized by at least 80% identity, at least 85% identity, preferably at least 90% identity, and more preferably at least 95% identity to any of the sequences SEQ ID NOs: 1116-1167. On nucleic acid level, any polynucleotide (e.g. RNA) moiety may be selected which encodes such polypeptide element.

[0192] 3.1.4 Virus Like Particle (VLP) Forming Elements

[0193] VLPs are self-assembled viral structural proteins (envelope proteins or capsid proteins) that structurally resemble viruses (without containing viral genetic material). VLPs contain repetitive high density displays of antigens which present conformational epitopes that can elicit strong T cell and B cell immune responses.

[0194] When used in combination with a polypeptide or protein of interest in the context of the present invention, such VLP forming element can be placed N-terminal or C-terminal to the polypeptide of interest. On nucleic acid level, the coding sequence for such VLP forming element is typically placed in frame (i.e. in the same reading frame), 5′ or 3′ to the coding sequence for the polypeptide or protein of interest.

[0195] For nucleic acid (e.g. RNA) encoding a polypeptide or protein of interest, particularly antigenic polypeptides or proteins associated with infectious (e.g. viral) diseases, it may be beneficial to introduce a VLP forming element into the respective constructs. In addition to the “clustering” of epitopes, an improved secretion of the VLP particle may also increase the immunogenicity of the respective antigen.

[0196] VLP forming elements fused to an antigen may generate virus like particles containing repetitive high density displays of antigens. VLP forming elements may be selected e.g. from any one of SEQ ID NOs: 1168-1227. Essentially, such VLP forming elements can be chosen from any viral or phage capsid or envelope protein.

[0197] VLP forming elements may be used as additional elements to promote or improve the particle formation of the target protein. Suitably, the polypeptide sequence of the VLP forming element used in the present invention is selected from the following list of polypeptide sequences (SEQ ID NOs: 1168-1227).

[0198] On nucleic acid level, particularly RNA level, any nucleotide sequence moiety can be employed that encodes any of VLP forming element used in the present invention. In specific embodiments, such nucleotide sequence is selected to encode a polypeptide selected from the following list of polypeptide sequences SEQ ID NOs: 1168-1227. Owing to the degenerated genetic code, in the case of most polypeptides SEQ ID NOs: 1168-1227, more than one particular nucleic acid sequence is conceivable as encoding the respective polypeptide of the below list. While each and every such nucleic acid may generally be used in the context of the present invention, it is preferable that the nucleic acid sequence that encodes the polypeptide sequence is selected such that its sequence is codon-optimized according to the general guidance provided in this specification.

[0199] Alternatively, any polypeptide element may be selected which is characterized by at least 80% identity, at least 85% identity, preferably at least 90% identity, and more preferably at least 95% identity to any of the sequences SEQ ID NOs: 1168-1227. On nucleic acid level, any polynucleotide (e.g. RNA) moiety may be selected which encodes such polypeptide element.

[0200] 3.1.5 Transmembrane Elements

[0201] Transmembrane elements or membrane spanning polypeptide elements are present in proteins that are integrated or anchored in plasma membranes of cells. Typical transmembrane elements are alpha-helical transmembrane elements. Such transmembrane elements are composed essentially of amino acids with hydrophobic side chains, because the interior of a cell membrane (lipid bilayer) is also hydrophobic. From the structural perspective, transmembrane elements are commonly single hydrophobic alpha helices or beta barrel structures; whereas hydrophobic alpha helices are usually present in proteins that are present in membrane anchored proteins (e.g., seven transmembrane domain receptors), beta-barrel structures are often present in proteins that generate pores or channels.

[0202] For target proteins, such as antigens associated with infectious (e.g. viral) diseases, it may be beneficial to introduce a transmembrane element into the respective constructs. By addition of a transmembrane element to the target peptide/protein it may be possible to further enhance the immune response, wherein the translated target peptide/protein, e.g. a viral antigen, anchors to a target membrane, e.g. the plasma membrane of a cell, thereby increasing immune responses. This effect is also referred to as antigen clustering.

[0203] When used in combination with a polypeptide or protein of interest in the context of the present invention, such transmembrane element can be placed N-terminal or C-terminal to the polypeptide of interest. On nucleic acid level, the coding sequence for such transmembrane element is typically placed in frame (i.e. in the same reading frame), 5′ or 3′ to the coding sequence for the polypeptide or protein of interest.

[0204] The transmembrane domain may be selected from the transmembrane domain of Hemagglutinin (HA) of Influenza virus, Env of HIV-1, EIAV (equine infectious anaemia virus), MLV (murine leukaemia virus), mouse mammary tumor virus, G protein of VSV (vesicular stomatitis virus), Rabies virus, or a transmembrane element of a seven transmembrane domain receptor. Specific elements are provided in the Table below.

[0205] As shown in the examples of the present invention, it is equally possible by the present invention to remove a transmembrane (TM) element from a polypeptide or protein. Thereby, an optimized nucleic acid can be prepared which does not code for the respective transmembrane (TM) element.

[0206] Suitably, the polypeptide sequence of the transmembrane (TM) domain used in the present invention is selected from the following list of polypeptide sequences (SEQ ID NOs: 1228-1343).

[0207] On nucleic acid level, particularly RNA level, any nucleotide sequence moiety can be employed that encodes any transmembrane (TM) domain used in the present invention. In specific embodiments, such nucleotide sequence is selected to encode a polypeptide selected from the following list of polypeptide sequences SEQ ID NOs: 1228-1343. Owing to the degenerated genetic code, in the case of most polypeptides SEQ ID NOs: 1228-1343, more than one particular nucleic acid sequence is conceivable as encoding the respective polypeptide. While each and every such nucleic acid may generally be used in the context of the present invention, it is preferable that the nucleic acid sequence that encodes the polypeptide sequence is selected such that its sequence is codon-optimized according to the general guidance provided in this specification.

[0208] Alternatively, any polypeptide element may be selected which is characterized by at least 80% identity, at least 85% identity, preferably at least 90% identity, and more preferably at least 95% identity to any of the sequences SEQ ID NOs: 1228-1343. On nucleic acid level, any polynucleotide (e.g. RNA) moiety may be selected which encodes such polypeptide element.

[0209] 3.1.6 Dendritic Cell Targeting Elements

[0210] Dendritic cells (DCs), the most potent antigen presenting cells (APCs), link the innate immune response to the adaptive immune response. They bind and internalize pathogens/antigens and display fragments of the antigen on their membrane (via MHC molecules) to stimulate T-cell responses against those pathogens/antigens. Polypeptide elements capable of targeting to dendritic cells are referred to as dendritic cell targeting elements.

[0211] When used in combination with a polypeptide or protein of interest in the context of the present invention, such dendritic cell targeting element can be placed N-terminal or C-terminal to the polypeptide of interest. On nucleic acid level, the coding sequence for such dendritic cell element is typically placed in frame (i.e. in the same reading frame), 5′ or 3′ to the coding sequence for the polypeptide or protein of interest.

[0212] Targeting antigens to DCs is an appropriate method to stimulate and induce effective antitumor and antiviral immune responses. To achieve dendritic cell targeting, proteins/peptides (e.g., antibody fragments, receptor ligands) that bind to DC surface receptors have to be fused to the respective antigen/target protein. Such DC receptors include C-type lectins (mannose receptors (e.g., MR1, DEC-205 (CD205)), CD206, DC-SIGN (CD209), Clec9a, DCIR, Lox-1, MGL, MGL-2, Clec12A, Dectin-1, Dectin-2, langerin (CD207)), scavenger receptors, F4/80 receptors (EMR1), DC-STAMP, receptors for the Fc portion of antibodies (Fc receptors), toll-like receptors (e.g., TLR2, 5, 7, 8, 9) and complement receptors (e.g., CR1, CR2).

[0213] An antigen may be fused to the following elements to obtain targeting of dendritic cells: anti-DC-SIGN antibody, CD11c specific single chain fragments (scFV), DEC205-specific single chain fragments (scFV), soluble PD-1, chemokine (C motif) ligand XCL1, CD40 ligand, human IgG1, murine IgG2a, anti Celec 9A, anti MHCII scFV.

[0214] Essentially, any other protein/peptide element that binds to a receptor localized on dendritic cells may be used as an element (Apostolopoulos, Vasso, et al. “Targeting antigens to dendritic cell receptors for vaccine development.” Journal of drug delivery 2013 (2013); Kastenmüller, Wolfgang, et al. “Dendritic cell-targeted vaccines—hope or hype?” Nature Reviews Immunology 14.10 (2014): 705-711). Such dendritic cell antigens are also contemplated in the present invention.

[0215] Suitably, the polypeptide sequence of the dendritic cell targeting element used in the present invention is selected from the following list of polypeptide sequences (SEQ ID NOs: 1344-1359).

[0216] On nucleic acid level, particularly RNA level, any nucleotide sequence moiety can be employed that encodes any of dendritic cell targeting elements used in the present invention. In specific embodiments, such nucleotide sequence is selected to encode a polypeptide selected from the following list of polypeptide sequences SEQ ID NOs: 1344-1359. Owing to the degenerated genetic code, in the case of most polypeptides SEQ ID NOs: 1344-1359, more than one particular nucleic acid sequence is conceivable as encoding the respective polypeptide. While each and every such nucleic acid may generally be used in the context of the present invention, it is preferable that the nucleic acid sequence that encodes the polypeptide sequence is selected such that its sequence is codon-optimized according to the general guidance provided in this specification.

[0217] Alternatively, any polypeptide element may be selected which is characterized by at least 80% identity, at least 85% identity, preferably at least 90% identity, and more preferably at least 95% identity to any of the sequences SEQ ID NOs: 1344-1359. On nucleic acid level, any polynucleotide (e.g. RNA) moiety may be selected which encodes such polypeptide element.

[0218] 3.1.7 Immunologic Adjuvant Elements

[0219] Immunologic adjuvant elements, or adjuvant elements, may comprise peptide or protein elements that potentiate or “govern” the immune response. Such elements may include peptides/proteins that trigger a danger response (e.g., damage-associated molecular pattern molecules (DAMPs)), elements that activate the complement system (e.g., peptides/proteins involved in the classical complement pathway, the alternative complement pathway, and the lectin pathway) or elements that activate an innate immune response (e.g., pathogen-associated molecular pattern molecules, PAMPs).

[0220] When used in combination with a polypeptide or protein of interest in the context of the present invention, such immunologic adjuvant element can be placed N-terminal or C-terminal to the polypeptide of interest. On nucleic acid level, the coding sequence for such immunologic adjuvant element is typically placed in frame (i.e. in the same reading frame), 5′ or 3′ to the coding sequence for the polypeptide or protein of interest.

[0221] For target peptides/proteins such as antigens associated with infectious diseases or antigens associated with tumor diseases it may be beneficial to fuse the respective target peptide/protein to elements that potentiate the immune response against the target peptide/protein or shunts the immune response against the target peptide/protein towards a desired response (e.g., humoral or cellular response).

[0222] Immunologic adjuvant elements that may be fused to a target protein, may be selected from heat shock proteins (e.g., HSP60, HSP70, gp96), flagellin FliC, high mobility group box 1 proteins (e.g., HMGN1), extra domain A of fibronectin (EDA), C3 protein fragments (e.g. C3d), transferrin, g-defensin, or any other peptide/protein PAMP-receptor (PRs) ligand, DAMP or element that activates the complement system. Specific elements are provided in the table below (polypeptide sequences). Thus, suitably, the polypeptide sequence of the adjuvant element used in the present invention is selected from the following list of polypeptide sequences (SEQ ID NOs: 1360-1421).

[0223] On nucleic acid level, particularly RNA level, any nucleotide sequence moiety can be employed that encodes any of adjuvant element used in the present invention. In specific embodiments, such nucleotide sequence is selected to encode a polypeptide selected from the following list of polypeptide sequences SEQ ID NOs: 1360-1421. Owing to the degenerated genetic code, in the case of most polypeptides SEQ ID NOs: 1360-1421, more than one particular nucleic acid sequence is conceivable as encoding the respective polypeptide. While each and every such nucleic acid may generally be used in the context of the present invention, it is preferable that the nucleic acid sequence that encodes the polypeptide sequence is selected such that its sequence is codon-optimized according to the general guidance provided in this specification.

[0224] Alternatively, any polypeptide element may be selected which is characterized by at least 80 identity, at least 85% identity, preferably at least 90% identity, and more preferably at least 95% identity to any of the sequences SEQ ID NOs: 1360-1421. On nucleic acid level, any polynucleotide (e.g. RNA) moiety may be selected which encodes such polypeptide element.

[0225] 3.1.8 Elements Promoting Antigen Presentation

[0226] Many pathogens are too large to be recognized directly by immune cells. Therefore, they have to be internalized and digested into smaller fragments by specialized antigen-presenting cells (APCs), e.g. dendritic cells. The digestion of larger proteins occurs in a dedicated cellular compartment, the lysosome or the proteasome. After digestion, the smaller fragments are transported via exosome trafficking to the cell surface where the fragments are presented by major histocompatibility complex (MHC) molecules on the cell surface.

[0227] For target peptides/proteins such as antigens associated with infectious diseases or antigens associated with tumor diseases it may be beneficial to fuse the respective target peptide/protein to elements that promote antigen presentation. Such elements may comprise peptides/proteins that trigger the entry into the lysosome/proteasome pathway or that promote the entry into the exosome. In general, when used in combination with a polypeptide or protein of interest in the context of the present invention, such immunologic adjuvant element can be placed N-terminal or C-terminal to the polypeptide of interest. However, in practice, some particular elements may be particularly functional when they are present either at the N-terminus, or at the C-terminus, i.e. at the same terminus at which the respective particular elements are found in the wild-type context. In general, on nucleic acid level, the coding sequence for such immunologic adjuvant element is typically placed in frame (i.e. in the same reading frame), 5′ or 3′ (in analogy to the respective wild-type context) to the coding sequence for the polypeptide or protein of interest.

[0228] Such elements promoting antigen presentation may be selected e.g. from MHC invariant chain (Ii), invariant chain (Ii) lysosome targeting signal, sorting signal of the lysosomal-associated membrane protein LAMP-1, lysosomal integral membrane protein-II (LIMP-II), C1C2 Lactadherin domain. Specific elements are provided in the table below.

[0229] Elements promoting antigen presentation (or antigen-presentation promoting elements) may be used as additional elements to promote or improve the secretion of the target protein. Suitably, the polypeptide sequence of the antigen-presentation promoting element used in the present invention is selected from the following list of polypeptide sequences (SEQ ID NOs: 1422-1433).

[0230] On nucleic acid level, particularly RNA level, any nucleotide sequence moiety can be employed that encodes any of the antigen-presentation promoting elements used in the present invention. In specific embodiments, such nucleotide sequence is selected to encode a polypeptide selected from the following list of polypeptide sequences SEQ ID NOs: 1422-1433. Owing to the degenerated genetic code, in the case of most polypeptides SEQ ID NOs: 1422-1433, more than one particular nucleic acid sequence is conceivable as encoding the respective polypeptide. While each and every such nucleic acid may generally be used in the context of the present invention, it is preferable that the nucleic acid sequence that encodes the polypeptide sequence is selected such that its sequence is codon-optimized according to the general guidance provided in this specification.

[0231] Alternatively, any polypeptide element may be selected which is characterized by at least 80% identity, at least 85% identity, preferably at least 90% identity, and more preferably at least 95% identity to any of the sequences SEQ ID NOs: 1422-1433. On nucleic acid level, any polynucleotide (e.g. RNA) moiety may be selected which encodes such polypeptide element.

[0232] 3.1.9 2A Peptides

[0233] Viral 2A peptides (“self-cleaving” peptides) allow the expression of multiple proteins from a single open reading frame. The terms 2A peptide and 2A element are used interchangeably herein. The mechanism by the 2A sequence for generating two proteins from one transcript is by ribosome skipping—a normal peptide bond is impaired at 2A, resulting in two discontinuous protein fragments from one translation event.

[0234] When used in the context of the present invention, such 2A peptides are particularly useful when encoded by a nucleic acid encoding at least two functional protein elements. In general, a 2A element is useful when the nucleic acid molecule encodes at least one polypeptide or protein of interest and at least one further protein element. In a preferred embodiment, a 2A element is present when the polynucleotide of the invention encodes two proteins or polypeptides of interest, e.g. two antigens.

[0235] The coding sequence for such 2A peptide is typically located in between the coding sequence of the polypeptide of interest and the coding sequence of the least one further protein element (which may also be a polypeptide of interest), so that cleavage of the 2A peptide leads to two separate polypeptide molecules, at least one of them being a polypeptide or protein of interest.

[0236] For example, for expressing target proteins that are composed of several polypeptide chains, such as antibodies, it may be beneficial to provide coding information for both polypeptide chains on a single nucleic acid molecule, separated by a nucleic acid sequence encoding a 2A peptide. 2A peptides may also be beneficial when cleavage of the protein of interest from another encoded polypeptide element is desired.

[0237] 2A peptides may be derived from foot-and-mouth diseases virus, from equine rhinitis A virus, Thosea asigna virus, Porcine teschovirus-1. Specific elements are provided in the table below. Suitably, the polypeptide sequence of the 2A peptide used in the present invention is selected from the following list of polypeptide sequences (SEQ ID NOs: 1434-1508).

[0238] On nucleic acid level, particularly RNA level, any nucleotide sequence moiety can be employed that encodes any of 2A peptide used in the present invention. In specific embodiments, such nucleotide sequence is selected to encode a polypeptide selected from the following list of polypeptide sequences SEQ ID NOs: 1434-1508. Owing to the degenerated genetic code, in the case of most polypeptides SEQ ID NOs: 1434-1508, more than one particular nucleic acid sequence is conceivable as encoding the respective polypeptide. While each and every such nucleic acid may generally be used in the context of the present invention, it is preferable that the nucleic acid sequence that encodes the polypeptide sequence is selected such that its sequence is codon-optimized according to the general guidance provided in this specification.

[0239] Alternatively, any polypeptide element may be selected which is characterized by at least 80% identity, at least 85% identity, preferably at least 90% identity, and more preferably at least 95% identity to any of the sequences SEQ ID NOs: 1434-1508. On nucleic acid level, any polynucleotide (e.g. RNA) moiety may be selected which encodes such polypeptide element.

[0240] 3.1.10 Peptide Linker Elements

[0241] In protein constructs composed of several elements (e.g., target protein fused to a transmembrane domain), the protein elements are often separated by peptide linker elements. The same applies for polypeptides of interest having various domains. Such elements may be beneficial because they allow for a proper folding of the individual elements and thereby the proper functionality of each element. Alternatively, the term “spacer” or “peptide spacer” is used herein.

[0242] When used in the context of the present invention, such linkers or spacers are particularly useful when encoded by a nucleic acid encoding at least two functional protein elements, such as at least one polypeptide or protein of interest and at least one further protein or polypeptide element, preferably also selected from the list of coding moieties of the present invention. In that case, the linker is typically located on the polypeptide chain in between the polypeptide of interest and the at least one further protein element. On nucleic acid level, the coding sequence for such linker is typically placed in the reading frame, 5′ or 3′ to the coding sequence for the polypeptide or protein of interest, or placed between coding regions for individual polypeptide domains of a given protein of interest.

[0243] Peptide linkers are preferably composed of small, non-polar (e.g. Gly) or polar (e.g. Ser or Thr) amino acids. The small size of these amino acids provides flexibility, and allows for mobility of the connecting functional domains, as described by Chen et al. (Adv Drug Deliv Reb. 2013; 65(10): 1357-1369). The incorporation of Ser or Thr can maintain the stability of the linker in aqueous solutions by forming hydrogen bonds with the water molecules, and therefore reduces an interaction between the linker and the protein moieties. Rigid linkers generally maintain the distance between the protein domains and they may be based on helical structures and/or they have a sequence that is rich in proline. Cleavable linkers (also termed “cleavage linkers”) allow for in vivo separation of the protein domains. The mechanism of cleavage may be based e.g. on reduction of disulfide bonds within the linker sequence or proteolytic cleavage. The cleavage may be mediated by an enzyme (enzymatic cleavage), e.g. the cleavage linker may provide a protease sensitive sequence (e.g., furin cleavage).

[0244] A typical sequence of a flexible linker is composed of repeats of the amino acids Glycine (G) and Serine (S). For instance, the linker may have the following sequence: GS, GSG, SGG, SG, GGS, SGS, GSS, SSG. In some embodiments, the same sequence is repeated multiple times (e.g. two, three, four, five or six times) to create a longer linker. In other embodiments, a single amino acid residue such as S or G can be used as a linker.

[0245] Peptide linkers, including cleavage linkers, flexible linkers and rigid linkers, or spacers, may be selected from the ones shown in the table below.

[0246] Linkers or spacers may be used as additional elements to promote or improve the secretion of the target protein. Suitably, the polypeptide sequence of the linker or spacer used in the present invention is selected from the following list of polypeptide sequences (SEQ ID NOs: 1509-1565).

[0247] On nucleic acid level, particularly RNA level, any nucleotide sequence moiety can be employed that encodes any of linker or spacer used in the present invention. In specific embodiments, such nucleotide sequence is selected to encode a polypeptide selected from the following list of polypeptide sequences SEQ ID NOs: 1509-1565. Owing to the degenerated genetic code, in the case of most polypeptides of SEQ ID NOs: 1509-1565, more than one particular nucleic acid sequence is conceivable as encoding the respective polypeptide list. While each and every such nucleic acid may generally be used in the context of the present invention, it is preferable that the nucleic acid sequence that encodes the polypeptide sequence is selected such that its sequence is codon-optimized according to the general guidance provided in this specification.

[0248] Alternatively, any polypeptide element may be selected which is characterized by at least 80% identity, at least 85% identity, preferably at least 90% identity, and more preferably at least 95% identity to any of the sequences SEQ ID NOs: 1509-1565. On nucleic acid level, any polynucleotide (e.g. RNA) moiety may be selected which encodes such polypeptide element.

[0249] 3.1.11 Elements that Extend Protein Half-Life

[0250] The plasma half-life of therapeutic proteins is a critical factor in many clinical applications. When extension of protein half-life is desired, protein elements described herein may be incorporated. Such half-life extending elements are particularly useful for target proteins that are smaller than the kidney filtration cutoff of around 70 kDa and/or are subject to metabolic turnover by peptidases, which significantly limits their plasma half-life in vivo.

[0251] Elements that extend protein half-life may be derived from homo-amino acid polymer (HAPylation), albumin, the Fc portion of immmunoglobulins, albumin binding domains, albumin binding peptide, poly-glycine elements, elastin-like elements, transferrin, proline-alanine-serine polymers (PASylation), HCG beta-subunit CTP elements, XTEN derived elements, ELP elements (ELPylation), gelatin-like protein polymers, IgG1, IgG2, Ig binding domain of Staphylococcus, etc. Specific elements, without limiting the scope of the present invention, are provided in SEQ ID NOs: 1671-1727. Any other element that extends the half-life of the respective target protein may be suitable in the context of the present invention. Owing to the degenerated genetic code, in the case of most polypeptides of SEQ ID NOs: 1671-1727, more than one particular nucleic acid sequence is conceivable as encoding the respective polypeptide. While each and every such nucleic acid may generally be used in the context of the present invention, it is preferable that the nucleic acid sequence that encodes the polypeptide sequence is selected such that its sequence is codon-optimized according to the general guidance provided in this specification. Alternatively, any polypeptide element may be selected which is characterized by at least 80% identity, at least 85% identity, preferably at least 90% identity, and more preferably at least 95% identity to any of the sequences SEQ ID NOs: 1671-1727. On nucleic acid level, any polynucleotide (e.g. RNA) moiety may be selected which encodes such polypeptide element.

[0252] 3.1.11 Additional Coding Modules

[0253] The protein of interest may be fused or may comprise additional coding modules as listed below:
[0254] Elements encoding for cellular localisation signals including but not limited to membrane insertion or nuclear import signals
[0255] Elements suitable for targeting intracellular or extracellular proteins including but not limited to cellular receptors
[0256] Element suitable for targeting cell surface molecules including but not limited to glycans and cellular matrix components
[0257] Elements bearing mutations to stabilise defined folding states
[0258] Elements bearing mutations to enhance a multimeric assembly
[0259] Element generally stabilizing the protein
[0260] element enhancing protein solubility by altering hydrophobicity/hydrophilicity of the target protein
[0261] Elements suitable for recruiting parts of the cellular machinery

[0262] 3.2 Non-Coding Modules

[0263] Preferably, at least one non-coding nucleic acid moiety is present in the optimized nucleic acid molecule of the present invention.

[0264] 3.2.1 UTRs

[0265] Untranslated regions (UTRs) are non-coding moieties of a nucleic acid sequence, particularly of an RNA sequence, preferably mRNA, sequence.

[0266] Preferably, at least one untranslated region moiety (UTR moiety) is present in an RNA according to the present invention. Suitable UTR moieties are selected from 5′-UTR moieties and 3′-UTR moieties. Moreover, it is preferred that the optimized nucleic acid according to the present invention comprises at least one open reading frame, at least one 3′-UTR (moiety) and at least one 5′-UTR (moiety).

[0267] Preferably, the at least one 3′-UTR moiety and/or the at least one 5′-UTR moiety in the optimized nucleic acid molecule according to the present invention comprises or consists of a nucleic acid sequence which is derived from the 3′-UTR and/or the 5′-UTR of a eukaryotic protein coding gene, preferably from the 3′-UTR and/or the 5′-UTR of a vertebrate protein coding gene, more preferably from the 3′-UTR and/or the 5′-UTR of a mammalian protein coding gene, e.g. from mouse and human protein coding genes, even more preferably from the 3′-UTR and/or the 5′-UTR of a primate or rodent protein coding gene, in particular the 3′-UTR and/or the 5′-UTR of a human or murine protein coding gene.

[0268] In general, it is understood that the at least one 3′-UTR moiety in the optimized nucleic acid molecule according to the present invention comprises or consists of a nucleic acid sequence which is preferably derived from a naturally (in nature) occurring 3′-UTR, whereas the at least one 5′-UTR moiety in the optimized nucleic acid molecule according to the present invention comprises or consists of a nucleic acid sequence which is preferably derived from a naturally (in nature) occurring 5′-UTR.

[0269] Preferably, the at least one open reading frame is heterologous to the at least one 3′-UTR moiety and/or to the at least one 5′-UTR moiety. The term “heterologous” in this context means that two sequence moieties comprised by the optimized nucleic acid molecule, such as the open reading frame and the 3′-UTR moiety and/or the open reading frame and the 5′-UTR moiety, do not occur naturally (in nature) in this combination. They are typically recombinant. Preferably, the 3′-UTR moiety and/or the 5′-UTR moiety are/is derived from a different gene than the open reading frame. For example, the ORF may be derived from a different gene than the 3′-UTR moiety and/or to the at least one 5′-UTR moiety, e.g. encoding a different protein or the same protein but of a different species etc. I.e. the open reading frame is derived from a gene which is distinct from the gene from which the 3′-UTR moiety and/or to the at least one 5′-UTR moiety is derived. In a preferred embodiment, the ORF does not encode a human or plant (e.g., Arabidopsis) ribosomal protein, preferably does not encode human ribosomal protein S6 (RPS6), human ribosomal protein L36a-like (RPL36AL) or Arabidopsis ribosomal protein S16 (RPS16). In a further preferred embodiment, the open reading frame (ORF) does not encode ribosomal protein S6 (RPS6), ribosomal protein L36a-like (RPL36AL) or ribosomal protein S16 (RPS16).

[0270] In specific embodiments it is preferred that the open reading frame does not code for a reporter protein, e.g., selected from the group consisting of globin proteins (particularly beta-globin), luciferase protein, GFP proteins or variants thereof, for example, variants exhibiting at least 70% sequence identity to a globin protein, a luciferase protein, or a GFP protein. Thereby, it is particularly preferred that the open reading frame does not code for a GFP protein. It is also particularly preferred that the open reading frame (ORF) does not encode a reporter gene or is not derived from a reporter gene, wherein the reporter gene is preferably not selected from group consisting of globin proteins (particularly beta-globin), luciferase protein, beta-glucuronidase (GUS) and GFP proteins or variants thereof, preferably not selected from EGFP, or variants of any of the above genes, typically exhibiting at least 70% sequence identity to any of these reporter genes, preferably a globin protein, a luciferase protein, or a GFP protein.

[0271] Even more preferably, the 3′-UTR moiety and/or the 5′-UTR moiety is heterologous to any other moiety comprised in the optimized nucleic acid as defined herein. For example, if the optimized nucleic acid according to the invention comprises a 3′-UTR moiety from a given gene, it does preferably not comprise any other nucleic acid sequence, in particular no functional nucleic acid sequence (e.g. coding or regulatory sequence moiety) from the same gene, including its regulatory sequences at the 5′ and 3′ terminus of the gene's ORF. Accordingly, for example, if the optimized nucleic acid according to the invention comprises a 5′-UTR moiety from a given gene, it does preferably not comprise any other nucleic acid sequence, in particular no functional nucleic acid sequence (e.g. coding or regulatory sequence moiety) from the same gene, including its regulatory sequences at the 5′ and 3′ terminus of the gene's ORF.

[0272] Preferably, the at least one 3′-UTR moiety and/or the at least one 5′-UTR moiety is functionally linked to an open reading frame (ORE) of the optimized nucleic acid molecule. This means preferably that the 3′-UTR moiety and/or to the at least one 5′-UTR moiety is associated with the ORF such that it may exert a function, such as an enhancing or stabilizing function on the expression of the encoded peptide or protein or a stabilizing function on the optimized nucleic acid molecule. Preferably, the ORF and the 3′-UTR moiety are associated in 5′→3′ direction and/or the 5′-UTR moiety and the ORF are associated in 5′→3′ direction. Thus, preferably, the optimized nucleic acid molecule comprises in general the structure 5′-[5′-UTR moiety]-(optional)-linker-ORF-(optional)-linker-[3′-UTR moiety]-3′, wherein the optimized nucleic acid molecule may comprise only a 5′-UTR moiety and no 3′-UTR moiety, only a 3′-UTR moiety and no 5′-UTR moiety, or both, a 3′-UTR moiety and a 5′-UTR moiety. Furthermore, the linker may be present or absent. For example, the linker may be one or more nucleotides, such as a stretch of 1-50 or 1-20 nucleotides, e.g., comprising or consisting of one or more restriction enzyme recognition sites (restriction sites).

[0273] Preferably, the at least one 3′-UTR moiety and/or the at least one 5′-UTR moiety comprises or consists of a nucleic acid sequence which is derived from the 3′-UTR and/or the 5′-UTR of a transcript of a gene. Preferably, the at least one 3′-UTR moiety and/or the at least one 5′-UTR moiety of the optimized nucleic acid molecule according to the present invention comprises or consists of a “functional fragment”, a “functional variant” or a “functional fragment of a variant” of the 3′-UTR and/or the 5′-UTR of a transcript of a gene.

[0274] The phrase “nucleic acid sequence which is derived from the 3′-UTR and/or the 5′-UTR of a of a transcript of a gene” preferably refers to a nucleic acid sequence which is based on the 3′-UTR sequence and/or on the 5′-UTR sequence of a transcript of a gene or a fragment or part thereof, preferably a naturally occurring gene or a fragment or part thereof. In this context, the term naturally occurring is used synonymously with the term wild-type. This phrase includes sequences corresponding to the entire 3′-UTR sequence and/or the entire 5′-UTR sequence, i.e. the full length 3′-UTR and/or 5′-UTR sequence of a transcript of a gene, and sequences corresponding to a fragment of the 3′-UTR sequence and/or the 5′-UTR sequence of a transcript of a gene. Preferably, a fragment of a 3′-UTR and/or a 5′-UTR of a transcript of a gene consists of a continuous stretch of nucleotides corresponding to a continuous stretch of nucleotides in the full-length 3′-UTR and/or 5′-UTR of a transcript of a gene, which represents at least 5%, 10%, 20%, preferably at least 30%, more preferably at least 40%, more preferably at least 50%, even more preferably at least 60%, even more preferably at least 70%, even more preferably at least 80%, and most preferably at least 90% of the full-length 3′-UTR and/or 5′-UTR of a transcript of a gene. Such a fragment, in the sense of the present invention, is preferably a functional fragment as described herein. Preferably, the fragment retains a regulatory function for the translation of the ORF linked to the 3′-UTR and/or 5′-UTR or fragment thereof.

[0275] The terms “variant of the 3′-UTR and/or variant of the 5′-UTR of a of a transcript of a gene” and “variant thereof” in the context of a 3′-UTR and/or a 5′-UTR of a transcript of a gene refers to a variant of the 3′-UTR and/or 5′-UTR of a transcript of a naturally occurring gene, preferably to a variant of the 3′-UTR and/or 5′-UTR of a transcript of a vertebrate gene, more preferably to a variant of the 3′-UTR and/or 5′-UTR of a transcript of a mammalian gene, even more preferably to a variant of the 3′-UTR and/or 5′-UTR of a transcript of a primate gene, in particular a human gene as described above. Such variant may be a modified 3′-UTR and/or 5′-UTR of a transcript of a gene. For example, a variant 3′-UTR and/or a variant of the 5′-UTR may exhibit one or more nucleotide deletions, insertions, additions and/or substitutions compared to the naturally occurring 3′-UTR and/or 5′-UTR from which the variant is derived. Preferably, a variant of a 3′-UTR and/or variant of the 5′-UTR of a of a transcript of a gene is at least 40%, preferably at least 50%, more preferably at least 60%, more preferably at least 70%, even more preferably at least 80%, even more preferably at least 90%, most preferably at least 95% identical to the naturally occurring 3′-UTR and/or 5′-UTR the variant is derived from. Preferably, the variant is a functional variant as described herein.

[0276] The terms “functional variant”, “functional fragment”, and “functional fragment of a variant” (also termed “functional variant fragment”) in the context of the present invention, mean that the fragment of the 3′-UTR and/or the 5′-UTR, the variant of the 3′-UTR and/or the 5′-UTR, or the fragment of a variant of the 3′-UTR and/or the 5′-UTR of a transcript of a gene fulfils at least one, preferably more than one function of the naturally occurring 3′-UTR and/or 5′-UTR of a transcript of a gene of which the variant, the fragment, or the fragment of a variant is derived. Such function may be, for example, stabilizing mRNA and/or enhancing, stabilizing and/or prolonging protein production from an mRNA and/or increasing protein expression or total protein production from an mRNA, preferably in a mammalian cell, such as in a human cell. Preferably, the function of the 3′-UTR and/or the 5′-UTR concerns the translation of the protein encoded by the ORF. More preferably, the function comprises enhancing translation efficiency of the ORF linked to the 3′-UTR and/or the 5′-UTR or fragment or variant thereof. It is particularly preferred that the variant, the fragment, and the variant fragment in the context of the present invention fulfil the function of stabilizing an mRNA, preferably in a mammalian cell, such as a human cell, compared to an mRNA comprising a reference 3′-UTR and/or a reference 5′-UTR or lacking a 3′-UTR and/or a 5′-UTR, and/or the function of enhancing, stabilizing and/or prolonging protein production from an mRNA, preferably in a mammalian cell, such as in a human cell, compared to an mRNA comprising a reference 3′-UTR and/or a reference 5′-UTR or lacking a 3′-UTR and/or a 5′-UTR, and/or the function of increasing protein production from an mRNA, preferably in a mammalian cell, such as in a human cell, compared to an mRNA comprising a reference 3′-UTR and/or a reference 5′-UTR or lacking a 3′-UTR and/or a 5′-UTR. A reference 3′-UTR and/or a reference 5′-UTR may be, for example, a 3′-UTR and/or a 5′-UTR naturally occurring in combination with the ORF. Furthermore, a functional variant, a functional fragment, or a functional variant fragment of a 3′-UTR and/or a 5′-UTR of a transcript of a gene preferably does not have a substantially diminishing effect on the efficiency of translation of the mRNA which comprises such variant, fragment, or variant fragment of a 3′-UTR and/or a 5′-UTR compared to the wild-type 3′-UTR and/or the wild-type 5′-UTR from which the variant, the fragment, or the variant fragment is derived. A particularly preferred function of a “functional fragment”, a “functional variant” or a “functional fragment of a variant” of the 3′-UTR and/or the 5′-UTR of a transcript of a gene in the context of the present invention is the enhancement, stabilization and/or prolongation of protein production by expression of an mRNA carrying the functional fragment, functional variant or functional fragment of a variant as described above. In the context of the present invention, the functional fragment of the 3′-UTR and/or of the 5′-UTR preferably exhibits a length of at least about 3 nucleotides, preferably of at least about 5 nucleotides, more preferably of at least about 10, 15, 20, 25 or 30 nucleotides, even more preferably of at least about 50 nucleotides, most preferably of at least about 70 nucleotides. In a preferred embodiment, the 3′-UTR and/or the 5′-UTR of a transcript of a gene or a fragment or variant thereof exhibits a length of between 3 and about 500 nucleotides, preferably of between 5 and about 150 nucleotides, more preferably of between 10 and 100 nucleotides, even more preferably of between 15 and 90, most preferably of between 20 and 70. Typically, the 5′-UTR moiety and/or the 3′-UTR moiety is characterized by less than 500, 400, 300, 200, 150 or less than 100 nucleotides.

[0277] The present invention comprises the association of such 5′-UTRs and 3′-UTRs with a nucleic acid molecule of interest, e.g. an ORF. The terms “associating the nucleic acid molecule or the vector with a 3′-UTR moiety and/or a 5′-UTR moiety” or “associating the optimized nucleic acid molecule or the vector with a 3′-UTR moiety and/or a 5′-UTR moiety”, or the like, in the context of the present invention preferably means functionally associating or functionally combining the artificial (optimized) nucleic acid molecule or the vector with the 3′-UTR moiety and/or with the 5′-UTR moiety. Thereby, further optimization (i.e. gain of additional desired functional properties) may be achieved. This means that the artificial (optimized) nucleic acid molecule and the 3′-UTR moiety and/or the 5′-UTR moiety, preferably the 3′-UTR moiety and/or the 5′-UTR moiety, are associated or coupled such that the function of the 3′-UTR moiety and/or of the 5′-UTR moiety, e.g., the RNA and/or protein production prolonging and/or increasing function, is exerted. Typically, this means that the 3′-UTR moiety and/or the 5′-UTR moiety is integrated into the artificial (optimized) nucleic acid molecule, preferably the mRNA molecule, 3′ and/or 5′, respectively, to an open reading frame (ORF), preferably immediately 3′ to an open reading frame and/or immediately 5′ to an open reading frame, the 3′-UTR moiety preferably between the open reading frame and a poly(A) sequence or a polyadenylation signal. Preferably, the 3′-UTR moiety and/or the 5′-UTR moiety is integrated into the artificial (optimized) nucleic acid molecule or the vector, preferably the mRNA, as 3′-UTR and/or as 5′-UTR respectively, i.e. such that the 3′-UTR moiety and/or the 5′-UTR moiety is the 3′-UTR and/or the 5′-UTR, respectively, of the artificial (optimized) nucleic acid molecule or the vector, preferably the mRNA, i.e., such that the 5′-UTR ends immediately before the 5′-end of the ORF and the 3′-UTR extends from the 3′-side of the open reading frame to the 5′-side of a poly(A) sequence or a polyadenylation signal, optionally connected via a short linker, such as a sequence comprising or consisting of one or more restriction sites. Thus, preferably, the terms “associating the artificial nucleic acid molecule or the vector with a 3′-UTR moiety and/or a 5′-UTR moiety” or associating the optimized nucleic acid molecule or the vector with a 3′-UTR moiety and/or a 5′-UTR moiety” mean functionally associating the 3′-UTR moiety and/or the 5′-UTR moiety with an open reading frame located within the artificial (optimized) nucleic acid molecule or the vector, preferably within the mRNA molecule. Thereby, further optimization may be achieved. The association with a 3′-UTR moiety and/or a 5′-UTR moiety can either be achieved by de novo association of individual moieties, or by modifying a pre-existing nucleic acid (template). Thus, the present invention comprises a method of associating an open reading frame (ORE) encoding a polypeptide or protein of interest and optional further element(s) with a 3′-UTR moiety and/or with a 5′-UTR moiety.

[0278] It is particularly preferred that the optimized nucleic acid of the invention comprises both (i) at least one preferred 5′-UTR and (ii) at least one preferred 3′-UTR, each as described herein. Furthermore, the optimized nucleic acid molecule according to the present invention may comprise more than one 3′-UTR moieties and/or more than one 5′-UTR moieties as described herein. For example, the optimized nucleic acid molecule according to the present invention may comprise one, two, three, four or more 3′-UTR moieties, and/or one, two, three, four or more 5′-UTR moieties, wherein the individual 3′-UTR moieties may be the same or they may be different, and similarly, the individual 5′-UTR moieties may be the same or they may be different. For example, the optimized nucleic acid molecule according to the present invention may comprise two essentially identical 3′-UTR moieties. Accordingly, for example, the optimized nucleic acid molecule according to the present invention may comprise two essentially identical 5′-UTR moieties.

[0279] The term “3′-UTR moiety” refers to a nucleic acid sequence which comprises or consists of a nucleic acid sequence that is derived from a 3′-UTR or from a variant or a fragment of a 3′-UTR. A “3′-UTR moiety” preferably refers to a nucleic acid sequence which is comprised by a 3′-UTR of an optimized nucleic acid sequence, such as an optimized mRNA. Accordingly, in the sense of the present invention, preferably, a 3′-UTR moiety may be comprised by the 3′-UTR of an mRNA, preferably of an optimized mRNA, or a 3′-UTR moiety may be comprised by the 3′-UTR of the respective transcription template. Preferably, a 3′-UTR moiety is a nucleic acid sequence which corresponds to the 3′-UTR of an mRNA, preferably to the 3′-UTR of an optimized mRNA, such as an mRNA obtained by transcription of a genetically engineered vector construct. Preferably, a 3′-UTR moiety in the sense of the present invention functions as a 3′-UTR or codes for a nucleotide sequence that fulfils the function of a 3′-UTR.

[0280] Accordingly, the term “5′-UTR moiety” refers to a nucleic acid sequence which comprises or consists of a nucleic acid sequence that is derived from a 5′-UTR or from a variant or a fragment of a 5′-UTR. A “5′-UTR moiety” preferably refers to a nucleic acid sequence which is comprised by a 5′-UTR of an optimized nucleic acid sequence, such as an optimized mRNA. Accordingly, in the sense of the present invention, preferably, a 5′-UTR moiety may be comprised by the 5′-UTR of an mRNA, preferably of an optimized mRNA, or a 5′-UTR moiety may be comprised by the 5′-UTR of the respective transcription template. Preferably, a 5′-UTR moiety is a nucleic acid sequence which corresponds to the 5′-UTR of an mRNA, preferably to the 5′-UTR of an optimized mRNA, such as an mRNA obtained by transcription of a genetically engineered vector construct. Preferably, a 5′-UTR moiety in the sense of the present invention functions as a 5′-UTR or codes for a nucleotide sequence that fulfils the function of a 5′-UTR.

[0281] The 3′-UTR moiety and/or the 5′-UTR moiety in the optimized nucleic acid molecule according to the present invention provides one or more beneficial UTR property to said optimized nucleic acid molecule. Thus, the optimized nucleic acid molecule according to the present invention may in particular comprise:
[0282] a 3′-UTR moiety which provides one or more beneficial UTR property to said optimized nucleic acid molecule,
[0283] a 5′-UTR moiety which provides one or more beneficial UTR property to said optimized nucleic acid molecule,
[0284] a 3′-UTR moiety which provides one or more beneficial UTR property to said optimized nucleic acid molecule and a 5′-UTR moiety which provides one or more beneficial UTR property to said optimized nucleic acid molecule.

[0285] As described in detail below, said at least one 3′-UTR moiety which provides one or more beneficial UTR property to said optimized nucleic acid molecule or said at least one 5′-UTR moiety which provides one or more beneficial UTR property to said optimized nucleic acid molecule can be selected from naturally occurring (preferably heterologous) 3′-UTR moieties and 5′-UTR moieties (together naturally occurring UTR moieties or wild-type UTR moieties), and from optimized 3′-UTR moieties and optimized 5′-UTR moieties (together optimized UTR moieties). Wild-type UTR moieties can be selected from the group comprising wild-type UTR moieties published in the literature and in publically accessible databases, such as GenBank (NCBI), and wild-type UTR moieties not previously published. The latter can be identified by sequencing mRNAs found in cells, preferably mammalian cells. Using this approach, the present inventors identified several wild-type UTR moieties not previously published, and UTR moieties of this type are provided in the present invention. The term artificial UTR moiety is not particularly limited and can refer to any nucleic acid sequence not found in nature, i.e. nonidentical to a wild-type UTR moiety. In preferred embodiments, however, the artificial UTR moiety used in the present invention is a nucleic acid sequence which shows a certain degree of sequence identity to a wild-type UTR moiety, such as 10 to 99.9%, 20 to 99%, 30 to 98%, 40 to 97%, 50 to 96%, 60 to 95%, 70 to 90%. In preferred embodiments, artificial UTR moiety used in the present invention is identical to a wild-type UTR moiety, except that one, or two, or three, or four, or five, or more than five nucleotides have been substituted by the same number of nucleotides (e.g. one nucleotide being substituted by one nucleotide). Preferably, substitution of one nucleotide is a substitution by the respective complementary nucleotide. Preferred artificial UTR moieties correspond to wild-type UTR moieties, except that (i) some or all ATG triplets in a wild-type 5′-UTR moiety (if present) are converted to the triplet TAG; and/or (ii) selected cleavage site(s) for a particular restriction enzyme in a wild-type 5′-UTR moiety or in a in a wild-type 3′-UTR moiety (if present) are eliminated by substituting one nucleotide within the cleavage site for said specific restriction enzyme by the complementary nucleotide, thereby removing the cleavage sites for said specific restriction enzyme. The latter is usually desired when a (e.g. wild-type) UTR moiety comprises a cleavage site for said specific restriction enzyme, and when said particular restriction enzyme is (planned to be) used in subsequent cloning steps. Since such internal cleavage of 5′-UTR moieties and 3′-UTR moieties is undesired, an artificial UTR moiety can be generated in which the restriction cleavage site for said specific restriction enzyme is eliminated. Such substitution can be done by any suitable method known to the person skilled in the art, e.g. use of modified primers by PCR.

[0286] Preferably, the optimized nucleic acid molecule according to the present invention comprises a 3′-UTR moiety which provides one or more beneficial UTR property to said optimized nucleic acid molecule and/or a 5′-UTR moiety which provides one or more beneficial UTR property to said optimized nucleic acid molecule.

[0287] Preferably, the optimized nucleic acid molecule according to the present invention comprises at least one 3′-UTR moiety and at least one 5′-UTR moiety, i.e. at least one 3′-UTR moiety which provides one or more beneficial UTR property to said optimized nucleic acid molecule and at least one 5′-UTR moiety which provides one or more beneficial UTR property to said optimized nucleic acid molecule.

[0288] Specific useful UTRs useful for the present invention may be selected from the specific 5′-UTRs and the specific 3′-UTRs described in the following.

[0289] 3.2.1.1 5′-UTRs

[0290] Specific 5′-UTRs useful in the context of the present invention may be selected from the ones described in the following.

[0291] In some embodiments, the 5′-UTR moiety used in the present invention differs from a wild-type 5′-UTR moiety. Such 5′-UTR moieties are designated “artificial 5′-UTR moieties”. Typically the artificial 5′-UTR moiety differs from the wild-type 5′-UTR moiety it is based on in that at least one nucleotide, such as two nucleotides, three nucleotides, four nucleotides, five nucleotides, six nucleotides, seven nucleotides, eight nucleotides, nine nucleotides, ten nucleotides, or more than ten nucleotides, is/are exchanged. For example, such a nucleotide exchange may be recommendable in case the wild-type 5′-UTR moiety comprises a nucleotide moiety which is considered disadvantageous. For example, in some embodiments a nucleotide moiety which is considered disadvantageous is selected from (i) an internal ATG triplet (i.e. an ATG triplet other than the start codon of the open reading frame of the nucleic acid of the invention) or (ii) a restriction enzyme recognition site (cleavage site), particularly the restriction enzyme recognition site (cleavage site) which is recognized (cleavable) by a restriction enzyme used in the process of making (cloning) the optimized nucleic acid of the present invention. Hence, it is possible to specifically introduce certain base(s) (in exchange for the respective wild-type base(s)), so that the artificial 5′-UTR moiety does not contain a nucleotide moiety which is considered disadvantageous.

[0292] Optionally, the 5′-UTR comprises or consists of a nucleic acid sequence which is derived from the 5′-UTR of a TOP gene or which is derived from a fragment, homolog or variant of the 5′-UTR of a TOP gene.

[0293] The nucleic acid sequence which is derived from the 5′-UTR of a TOP gene is derived from a eukaryotic TOP gene, preferably a plant or animal TOP gene, more preferably a chordate TOP gene, even more preferably a vertebrate TOP gene, most preferably a mammalian TOP gene, such as a human TOP gene.

[0294] For example, the 5′-UTR is preferably selected from 5′-UTR moieties comprising or consisting of a nucleic acid sequence which is derived from a nucleic acid sequence selected from the group consisting of SEQ ID NOs. 1-1363, SEQ ID NO. 1395, SEQ ID NO. 1421 and SEQ ID NO. 1422 of the patent application WO2013/143700 whose disclosure is incorporated herein by reference, from the homologs of SEQ ID NOs. 1-1363, SEQ ID NO. 1395, SEQ ID NO. 1421 and SEQ ID NO. 1422 of the patent application WO2013/143700, from a variant thereof, or preferably from a corresponding RNA sequence. The term “homologs of SEQ ID NOs. 1-1363, SEQ ID NO. 1395, SEQ ID NO. 1421 and SEQ ID NO. 1422 of the patent application WO2013/143700” refers to sequences of other species than Homo sapiens, which are homologous to the sequences according to SEQ ID NOs. 1-1363, SEQ ID NO. 1395, SEQ ID NO. 1421 and SEQ ID NO. 1422 of the patent application WO2013/143700.

[0295] Optionally, the 5′-UTR comprises or consists of a nucleic acid sequence which is derived from a nucleic acid sequence extending from nucleotide position 5 (i.e. the nucleotide that is located at position 5 in the sequence) to the nucleotide position immediately 5′ to the start codon (located at the 3′ end of the sequences), e.g. the nucleotide position immediately 5′ to the ATG sequence, of a nucleic acid sequence selected from SEQ ID NOs. 1-1363, SEQ ID NO. 1395, SEQ ID NO. 1421 and SEQ ID NO. 1422 of the patent application WO2013/143700, from the homologs of SEQ ID NOs. 1-1363, SEQ ID NO. 1395, SEQ ID NO. 1421 and SEQ ID NO. 1422 of the patent application WO2013/143700, from a variant thereof, or a corresponding RNA sequence. It is particularly preferred that the 5′-UTR is derived from a nucleic acid sequence extending from the nucleotide position immediately 3′ to the 5′TOP to the nucleotide position immediately 5′ to the start codon (located at the 3′ end of the sequences), e.g. the nucleotide position immediately 5′ to the ATG sequence, of a nucleic acid sequence selected from SEQ ID NOs. 1-1363, SEQ ID NO. 1395, SEQ ID NO. 1421 and SEQ ID NO. 1422 of the patent application WO2013/143700, from the homologs of SEQ ID NOs. 1-1363, SEQ ID NO. 1395, SEQ ID NO. 1421 and SEQ ID NO. 1422 of the patent application WO2013/143700, from a variant thereof, or a corresponding RNA sequence.

[0296] In a particularly preferred embodiment, the further 5′-UTR comprises or consists of a nucleic acid sequence which is derived from a 5′-UTR of a TOP gene encoding a ribosomal protein or from a variant of a 5′-UTR of a TOP gene encoding a ribosomal protein. For example, the 5′-UTR moiety comprises or consists of a nucleic acid sequence which is derived from a 5′-UTR of a nucleic acid sequence according to any of SEQ ID NOs: 170, 232, 244, 259, 1284, 1285, 1286, 1287, 1288, 1289, 1290, 1291, 1292, 1293, 1294, 1295, 1296, 1297, 1298, 1299, 1300, 1301, 1302, 1303, 1304, 1305, 1306, 1307, 1308, 1309, 1310, 1311, 1312, 1313, 1314, 1315, 1316, 1317, 1318, 1319, 1320, 1321, 1322, 1323, 1324, 1325, 1326, 1327, 1328, 1329, 1330, 1331, 1332, 1333, 1334, 1335, 1336, 1337, 1338, 1339, 1340, 1341, 1342, 1343, 1344, 1346, 1347, 1348, 1349, 1350, 1351, 1352, 1353, 1354, 1355, 1356, 1357, 1358, 1359, or 1360 of the patent application WO2013/143700, a corresponding RNA sequence, a homolog thereof, or a variant thereof as described herein, optionally lacking the 5′-TOP motif. As described above, the sequence extending from position 5 to the nucleotide immediately 5′ to the ATG (which is located at the 3′end of the sequences) corresponds to the 5′-UTR of said sequences.

[0297] Optionally, the 5′-UTR comprises or consists of a nucleic acid sequence which is derived from a 5′-UTR of a TOP gene encoding a ribosomal Large protein (RPL) or from a homolog or variant of a 5′-UTR of a TOP gene encoding a ribosomal Large protein (RPL). For example, the 5′-UTR moiety comprises or consists of a nucleic acid sequence which is derived from a 5′-UTR of a nucleic acid sequence according to any of SEQ ID NOs: SEQ ID NOs: 67, 259, 1284-1318, 1344, 1346, 1348-1354, 1357, 1358, 1421 and 1422 of the patent application WO2013/143700, a corresponding RNA sequence, a homolog thereof, or a variant thereof as described herein, optionally lacking the 5′TOP motif.

[0298] Optionally, the 5′-UTR moiety comprises or consists of a nucleic acid sequence which is derived from the 5′-UTR of a ribosomal protein Large 32 gene, preferably from a vertebrate ribosomal protein Large 32 (L32) gene, more preferably from a mammalian ribosomal protein Large 32 (L32) gene, most preferably from a human ribosomal protein Large 32 (L32) gene, or from a variant of the 5′-UTR of a ribosomal protein Large 32 gene, preferably from a vertebrate ribosomal protein Large 32 (L32) gene, more preferably from a mammalian ribosomal protein Large 32 (L32) gene, most preferably from a human ribosomal protein Large 32 (L32) gene, wherein preferably the further 5′-UTR does not comprise the 5′TOP of said gene.

[0299] Accordingly, the 5′-UTR moiety can comprise or consist of a nucleic acid sequence which has an identity of at least about 40%, preferably of at least about 50%, preferably of at least about 60%, preferably of at least about 70%, more preferably of at least about 80%, more preferably of at least about 90%, even more preferably of at least about 95%, even more preferably of at least about 99% to the nucleic acid sequence according to SEQ ID NO: 1804 (5′-UTR of human ribosomal protein Large 32 lacking the 5′ terminal oligopyrimidine tract; corresponding to SEQ ID NO. 1368 of the patent application WO2013/143700) or to a corresponding RNA sequence, or wherein the 5′-UTR moiety comprises or consists of a fragment of a nucleic acid sequence which has an identity of at least about 40%, preferably of at least about 50%, preferably of at least about 60%, preferably of at least about 70%, more preferably of at least about 80%, more preferably of at least about 90%, even more preferably of at least about 95%, even more preferably of at least about 99% to the nucleic acid sequence according to SEQ ID NO: 1804 or more preferably to a corresponding RNA sequence. Preferably, the fragment exhibits a length of at least about 20 nucleotides or more, preferably of at least about 30 nucleotides or more, more preferably of at least about 40 nucleotides or more. Preferably, the fragment is a functional fragment as described herein.

[0300] In some embodiments, the optimized nucleic acid molecule comprises a 5′-UTR which comprises or consists of a nucleic acid sequence which is derived from the 5′-UTR of a vertebrate TOP gene, such as a mammalian, e.g. a human TOP gene, selected from RPSA, RPS2, RPS3, RPS3A, RPS4, RPS5, RPS6, RPS7, RPS8, RPS9, RPS10, RPS11, RPS12, RPS13, RPS14, RPS15, RPS15A, RPS16, RPS17, RPS18, RPS19, RPS20, RPS21, RPS23, RPS24, RPS25, RPS26, RPS27, RPS27A, RPS28, RPS29, RPS30, RPL3, RPL4, RPL5, RPL6, RPL7, RPL7A, RPL8, RPL9, RPL10, RPL10A, RPL11, RPL12, RPL13, RPL13A, RPL14, RPL15, RPL17, RPL18, RPL18A, RPL19, RPL21, RPL22, RPL23, RPL23A, RPL24, RPL26, RPL27, RPL27A, RPL28, RPL29, RPL30, RPL31, RPL32, RPL34, RPL35, RPL35A, RPL36, RPL36A, RPL37, RPL37A, RPL38, RPL39, RPL40, RPL41, RPLP0, RPLP1, RPLP2, RPLP3, RPLP0, RPLP1, RPLP2, EEF1A1, EEF1B2, EEF1D, EEF1G, EEF2, EIF3E, EIF3F, EIF3H, EIF2S3, EIF3C, EIF3K, EIF3EIP, EIF4A2, PABPC1, HNRNPA1, TPT1, TUBB1, UBA52, NPM1, ATP5G2, GNB2L1, NME2, UQCRB or from a homolog or variant thereof, wherein preferably the further 5′-UTR does not comprise a TOP-motif or the 5′TOP of said genes, and wherein optionally the further 5′-UTR starts at its 5′-end with a nucleotide located at position 1, 2, 3, 4, 5, 6, 7, 8, 9 or 10 downstream of the 5′terminal oligopyrimidine tract (TOP) and wherein further optionally the further 5′-UTR which is derived from a 5′-UTR of a TOP gene terminates at its 3′-end with a nucleotide located at position 1, 2, 3, 4, 5, 6, 7, 8, 9 or 10 upstream of the start codon (A(U/T)G) of the gene it is derived from.

[0301] Alternatively, any polynucleotide moiety may be selected which is characterized by at least 80% identity, at least 85% identity, preferably at least 90% identity, and more preferably at least 95% identity to any of the above-described 5′-UTR sequences.

[0302] 3.2.1.2 3′-UTRs

[0303] Specific 3′-UTRs useful in the context of the present invention may be selected from the ones described in the following.

[0304] The 3′-UTR can comprise or consist of a nucleic acid sequence which is derived from a 3′-UTR of a gene selected from the group consisting of an albumin gene, an α-globin gene, a β-globin gene, a tyrosine hydroxylase gene, a lipoxygenase gene, and a collagen alpha gene, such as a collagen alpha 1(I) gene, or from a variant of a 3′-UTR of a gene selected from the group consisting of an albumin gene, an α-globin gene, a β-globin gene, a tyrosine hydroxylase gene, a lipoxygenase gene, and a collagen alpha gene, such as a collagen alpha 1(I) gene according to SEQ ID NO: 1369-1390 of the patent application WO2013/143700, whose disclosure is incorporated herein by reference. In this context the nucleic acid molecule of the present invention can comprises a 3′-UTR moiety derived from the nucleic acids according to SEQ ID NO. 1369-1390 of the patent application WO2013/143700 or a fragment, homolog or variant thereof.

[0305] In a particularly preferred embodiment, the further 3′-UTR comprises or consists of a nucleic acid sequence which is derived from a 3′-UTR of an albumin gene, preferably a vertebrate albumin gene, more preferably a mammalian albumin gene, most preferably a human albumin gene according to SEQ ID NO: 1728 (Human albumin 3′-UTR; corresponding to SEQ ID NO: 1369 of the patent application WO2013/143700).

[0306] The 3′-UTR may comprise a nucleic acid sequence derived from a fragment of the human albumin gene according to SEQ ID NO: 1729 (albumin7 3′-UTR; corresponding to SEQ ID NO: 1376 of the patent application WO2013/143700).

[0307] Thus, in embodiments, the 3′-UTR of the optimized nucleic acid molecule comprises or consists of the nucleic acid sequence according to SEQ ID NO: 1729, or a corresponding RNA sequence.

[0308] The 3′-UTR may also comprise or consist of a nucleic acid sequence derived from a ribosomal protein coding gene, whereby ribosomal protein coding genes from which a further 3′-UTR may be derived include, but are not limited to, ribosomal protein L9 (RPL9), ribosomal protein L3 (RPL3), ribosomal protein L4 (RPL4), ribosomal protein L5 (RPL5), ribosomal protein L6 (RPL6), ribosomal protein L7 (RPL7), ribosomal protein L7a (RPL7A), ribosomal protein L11 (RPL11), ribosomal protein L12 (RPL12), ribosomal protein L13 (RPL13), ribosomal protein L23 (RPL23), ribosomal protein L18 (RPL18), ribosomal protein L18a (RPL18A), ribosomal protein L19 (RPL19), ribosomal protein L21 (RPL21), ribosomal protein L22 (RPL22), ribosomal protein L23a (RPL23A), ribosomal protein L17 (RPL17), ribosomal protein L24 (RPL24), ribosomal protein L26 (RPL26), ribosomal protein L27 (RPL27), ribosomal protein L30 (RPL30), ribosomal protein L27a (RPL27A), ribosomal protein L28 (RPL28), ribosomal protein L29 (RPL29), ribosomal protein L31 (RPL31), ribosomal protein L32 (RPL32), ribosomal protein L35a (RPL35A), ribosomal protein L37 (RPL37), ribosomal protein L37a (RPL37A), ribosomal protein L38 (RPL38), ribosomal protein L39 (RPL39), ribosomal protein, large, P0 (RPLP0), ribosomal protein, large, P1 (RPLP1), ribosomal protein, large, P2 (RPLP2), ribosomal protein S3 (RPS3), ribosomal protein S3A (RPS3A), ribosomal protein S4, X-linked (RPS4X), ribosomal protein S4, Y-linked 1 (RPS4Y1), ribosomal protein S5 (RPS5), ribosomal protein S6 (RPS6), ribosomal protein S7 (RPS7), ribosomal protein S8 (RPS8), ribosomal protein S9 (RPS9), ribosomal protein 510 (RPS10), ribosomal protein S11 (RPS11), ribosomal protein S12 (RPS12), ribosomal protein S13 (RPS13), ribosomal protein S15 (RPS15), ribosomal protein S15a (RPS15A), ribosomal protein S16 (RPS16), ribosomal protein S19 (RPS19), ribosomal protein S20 (RPS20), ribosomal protein S21 (RPS21), ribosomal protein S23 (RPS23), ribosomal protein S25 (RPS25), ribosomal protein S26 (RPS26), ribosomal protein S27 (RPS27), ribosomal protein S27a (RPS27a), ribosomal protein S28 (RPS28), ribosomal protein S29 (RPS29), ribosomal protein L15 (RPL15), ribosomal protein S2 (RPS2), ribosomal protein L14 (RPL14), ribosomal protein S14 (RPS14), ribosomal protein L10 (RPL10), ribosomal protein L10a (RPL10A), ribosomal protein L35 (RPL35), ribosomal protein L13a (RPL13A), ribosomal protein L36 (RPL36), ribosomal protein L36a (RPL36A), ribosomal protein L41 (RPL41), ribosomal protein S18 (RPS18), ribosomal protein S24 (RPS24), ribosomal protein L8 (RPL8), ribosomal protein L34 (RPL34), ribosomal protein S17 (RPS17), ribosomal protein SA (RPSA), ubiquitin A-52 residue ribosomal protein fusion product 1 (UBA52), Finkel-Biskis-Reilly murine sarcoma virus (FBR-MuSV) ubiquitously expressed (FAU), ribosomal protein L22-like 1 (RPL22L1), ribosomal protein S17 (RPS17), ribosomal protein L39-like (RPL39L), ribosomal protein L10-like (RPL10L), ribosomal protein L36a-like (RPL36AL), ribosomal protein L3-like (RPL3L), ribosomal protein S27-like (RPS27L), ribosomal protein L26-like 1 (RPL26L1), ribosomal protein L7-like 1 (RPL7L1), ribosomal protein L13a pseudogene (RPL13AP), ribosomal protein L37a pseudogene 8 (RPL37AP8), ribosomal protein S10 pseudogene 5 (RPS10P5), ribosomal protein S26 pseudogene 11 (RPS26P11), ribosomal protein L39 pseudogene 5 (RPL39P5), ribosomal protein, large, P0 pseudogene 6 (RPLP0P6) and ribosomal protein L36 pseudogene 14 (RPL36P14). Preferably the 3′-UTR comprises or consists of a nucleic acid sequence according to any one of SEQ ID NOs: 10 to 205 of WO2015/101414. Preferably, the at least one 3′-untranslated region element (3′-UTR element) comprises or consists of a nucleic acid sequence which is derived from the 3′-UTR of a FIG. 4 gene or from a variant of the 3′-UTR of a FIG. 4 gene. The term “a FIG. 4 gene” generally refers to a gene encoding FIG. 4, which is also known as, for instance, Sac Domain-Containing Inositol Phosphatase 3, SAC3, S. cerevisiae Homolog of FIG. 4 (see, for instance, Minagawa et al., 2001. Identification and Characterization of a Sac Domain-containing Phosphoinositide 5-Phosphatase, J. Biol. Chem., Vol. 276, p. 22011-22015; Takasuga and Sasaki, Phosphatidylinositol-3,5-biphosphate: metabolism and physiological functions, Journal of Biochemistry, Vol. 154, No. 3, 2013, p. 211-218). As used herein, the term “a FIG. 4 gene” refers to any FIG. 4 gene, irrespective of the species, from which it is derived. Specifically, the term refers to a mammalian FIG. 4 gene. Further, the term “a FIG. 4 gene” comprises any paralogs and orthologs of a mammalian FIG. 4 gene. Moreover, any sequence, which is characterized by substantial sequence similarity or identity is referred to as FIG. 4 gene in the context of the present invention. FIG. 4 genes and corresponding 3′-UTRs are disclosed in WO2015/101415, the contents of which are herein incorporated by reference. In particular, any 3′-UTR of a FIG. 4 gene according to the disclosure of WO2015/101415 can be selected as a nucleic acid moiety according to the present invention. Preferred moieties are represented by SEQ ID NO: 1 and 2 of WO2015/101415. This reference is incorporated herein in its entirety.

[0309] The suitability of a particular UTR can be detected by comparison of expression of a gene carrying the particular UTR to expression of a housekeeping gene. Respective sequences are disclosed in Table 1 of WO_2007_068265. Respective sequences are also disclosed in WO2014164253A1. These references are incorporated herein in their entirety.

[0310] Alternatively, any polynucleotide moiety may be selected which is characterized by at least 80% identity, at least 85% identity, preferably at least 90% identity, and more preferably at least 95% identity to any of the above-described 3′-UTR sequences.

[0311] 3.2.2 miRNA Moieties

[0312] A miRNA may also be selected as a moiety in the present invention. Any miRNA moiety known in the art may be selected. Such a moiety can be selected from microRNA target sequences, microRNA sequences, or microRNA seeds. For example, miRNA sequences (microRNA target sequences, microRNA sequences, or microRNA seeds) are described in WO 2015085318 A2, US 2005/0261218 and US2005/0059005. Identification of microRNA, microRNA target regions, and their expression patterns and role in biology have been reported (Bonauer et al., Curr Drug Targets 2010 11:943-949; Anand and Cheresh, Curr Opin Hematol 2011, 18: 171-176; Contreras and Rao Leukemia, 2012 26:404-413; Barrel, Cell, 2009 136:215-233; Landgraf et al., Cell, 2007 129: 1401-1414.

[0313] In general, microRNAs (or miRNA) are 19-25 nucleotide long noncoding RNAs. miRNAs bind to 3′-UTR of nucleic acid molecules. This causes down-regulation of gene expression, either by reducing nucleic acid molecule stability or by inhibiting translation. As a module of the present invention, the polynucleotides of the present invention may comprise one or more microRNA target sequences, microRNA sequences, or microRNA seeds.

[0314] As used herein, the term “microRNA site” refers to a polynucleotide sequence to which a microRNA can bind or otherwise associate. “binding” typically occurs by Watson-Crick hybridization; but any otherwise stable association of the microRNA with the target sequence at or adjacent to the microRNA site is also comprised in the concept of a “microRNA site” according to the present invention.

[0315] In general, a microRNA sequence comprises a “seed” region, i.e., a sequence typically in the region of positions 2-8 of a mature microRNA. The seed region sequence has perfect Watson-Crick complementarity to the miRNA target sequence. Such a microRNA seed may comprise positions 2-8, or alternatively 2-7 of the mature microRNA. Thus, in one embodiment, a microRNA seed comprises 7 nucleotides (e.g., nucleotides 2-8 of the mature microRNA), wherein the seed-complementary site in the corresponding miRNA target is flanked by an adenine (A) opposed to microRNA position 1. In another embodiment, a microRNA seed comprises 6 nucleotides (e.g., nucleotides 2-7 of the mature microRNA), wherein the seed-complementary site in the corresponding miRNA target is flanked by an adenine (A) opposed to microRNA position 1. Respective nucleic acid modules are disclosed in Grimson et al.; Mol Cell. 2007 Jul. 6; 27(1):91-105

[0316] In the present invention, a microRNA target sequence is typically designed to be comprised in a 3′-UTR or otherwise 3′ (upstream) of an open reading frame. In such case, the miRNA target sequence is thought to target the molecule for degradation or reduced translation, provided that a corresponding microRNA in question is available. This allows to control any undesired off-target effects upon delivery of the nucleic acid molecule of the present invention.

[0317] In case it is not desired to translate an mRNA in the liver, but the mRNA is transported to the liver or otherwise ends up there, then miR-122, a microRNA abundant in liver, can inhibit the expression of the nucleic acid of the present invention, if one or multiple target sites of miR-122 are present (e.g. designed) in the 3′-UTR region of the polynucleotide of the present invention. Introduction of one or multiple binding sites for different microRNA can be engineered to further influence (e.g. decrease) the longevity, stability, and protein translation of polynucleotides.

[0318] In contrast, in case it is indeed desired to translate an mRNA, microRNA binding sites can be engineered out of (i.e. removed from) sequences in which they occur, e.g., in order to increase protein expression in specific tissues. For example, one or more miR-122 binding sites may be removed to improve protein expression in the liver.

[0319] Thereby, regulation of expression in specific tissues can be accomplished through introduction or removal or one or several microRNA binding sites. For examples microRNAs are known to regulate mRNA, and thereby protein expression, without limitation in liver (miR-122), heart (miR-Id, miR-149), endothelial cells (miR-17-92, miR-126), adipose tissue (let-7, miR-30c), kidney (miR-192, miR-194, miR-204), myeloid cells (miR-142-3p, miR-142-5p, miR-16, miR-21, miR-223, miR-24, miR-27), muscle (miR-133, miR-206, miR-208), and lung epithelial cells (let-7, miR-133, miR-126). MicroRNA can also regulate complex biological processes such as angiogenesis (miR-132) (e.g. Anand and Cheresh, Curr. Opin. Hematol. 2011, 18: 171-176;).

[0320] Thus, in general, according to the modular design principle of the present invention, binding sites for microRNAs may be removed or introduced, in order to tailor the expression of the polynucleotides expression to desired cell types or tissues, or to the context of relevant biological processes. Listings of miRNA sequences and binding sites areavailable to the public. Any sequence disclosed in the literature discussed herein may be used in the context of the present invention: examples of microRNA that drive tissue- or disease-specific gene expression are listed in Getner and Naldini, Tissue Antigens. 2012, 80:393-403. An example of incorporation of microRNA seed sites is incorporation of miR-142 sites into a UGT1A1-expressing lentiviral vector, which causes reduced expression in antigen-presentating cells, leading to the absence of an immune response against the virally expressed UGT1A1 as disclosed in Schmitt et al., Gastroenterology 2010; 139:999-1007; Gonzalez-Asequinolaza et al. Gastroenterology 2010, 139:726-729. Thus, incorporation of one or more miR-142 seed sites into mRNA is thought to be be important in the case of treatment of patients with complete protein deficiencies (UGT1A1 type I, LDLR-deficient patients, CRIM-negative Pompe patients, etc.). Thereby, the nucleic acid molecule of the present invention can be designed to fit such purposes.

[0321] Any polynucleotide may be selected which is characterized by at least 80% identity, at least 85% identity, preferably at least 90% identity, and more preferably at least 95% identity to any of such miRNA sequences.

[0322] Owing to the different expression patterns of microRNA in different cell types, the present invention allows to specifically design polynucleotide molecules for targeted expression in specific cell types, or under specific biological conditions. Through introduction of tissue-specific microRNA binding sites, polynucleotides can be designed that for protein expression in a tissue or in the context of a biological condition.

[0323] 3.2.3 IRES Moieties

[0324] An internal ribosome entry site, abbreviated IRES, is a nucleotide sequence that allows for translation initiation in the middle of a messenger RNA (mRNA) sequence as part of the greater process of protein synthesis. While translation in eukaryotes is usually initiated only at the 5′ end of the mRNA molecule, presence of an IRES allows translation of the RNAs in a cap-independent manner. In nature, it is common that IRESes are located in the 5′UTR of RNA viruses. Presence of an IRES can allow for translation of two proteins from a single transcript (RNA): for such purposes, part of the present invention, an IRES is present downstream of the coding region of a first polypeptide element, but upstream of the coding region of a second polypeptide element on the same transcript. Translation of the first coding region is initiated at the normal 5′ cap, and the translation of the second coding region at the IRES. In general, IRES allow the expression of multiple proteins from a single nucleic acid molecule.

[0325] In the present invention, an internal ribosome entry site (IRES) sequence or IRES-motif may separate several open reading frames, for example if the optimized nucleic acid molecule encodes for two or more peptides or proteins. An IRES-sequence may be particularly helpful if the optimized nucleic acid molecule is a bi- or multicistronic nucleic acid molecule.

[0326] When used in the context of the present invention, such IRES are particularly useful when present in a nucleic acidencoding at least two functional protein moieties, such as at least one polypeptide or protein of interest and at least one further polypeptide or protein element, preferably also selected from the list of coding moieties of the present invention. In that case, the IRES is typically located on the polynucleotide chain in between the coding region for the protein of interest and the coding region for the at least one further protein element, so that translation leads to two separate polypeptide molecules, at least one of them being a polypeptide or protein of interest.

[0327] For example, for expressing target proteins that are composed of several polypeptide chains, such as antibodies, it may be beneficial to provide coding information for both peptide chains on a single nucleic acid molecule, separated by an IRES.

[0328] Suitably, the nucleotide sequence of the IRES used in the present invention is selected from the following list of nucleotide sequences (SEQ ID NOs: 1566-1662).

[0329] Alternatively, any polynucleotide may be selected which is characterized by at least 80 identity, at least 85% identity, preferably at least 90% identity, and more preferably at least 95% identity to any of the IRES sequences SEQ ID NOs: 1566-1662.

[0330] 3.2.4 Histone Stem-Loop

[0331] Preferably, the optimized nucleic acid molecule may additionally comprise a histone stem-loop. A histone-stem-loop, if present, is preferably localized 3′ (downstream) of a 3′UTR moiety, and upstream of a poly(A) sequence or polyadenylation signal (if present). Thus, an optimized nucleic acid molecule according to the present invention may, for example, comprise in 5′-to-3′-direction an ORF encoding a polypeptide of interest and optionally further element(s), a 3′-UTR moiety, an optional histone stem-loop sequence, an optional poly(A) sequence or polyadenylation signal and an optional poly(C) sequence. In another example, the optimized nucleic acid molecule according to the present invention may, for example, comprise in 5′-to-3′-direction an 5′-UTR moiety, an ORF encoding a polypeptide of interest and optionally further element(s), an optional histone stem-loop sequence, an optional poly(A) sequence or polyadenylation signal and an optional poly(C) sequence. In another example, the optimized nucleic acid molecule according to the present invention may, for example, comprise in 5′-to-3′-direction an 5′-UTR moiety, an ORF encoding a polypeptide of interest and optionally further element(s), a 3′-UTR moiety, an optional histone stem-loop sequence, an optional poly(A) sequence or polyadenylation signal and an optional poly(C) sequence. It may also comprise in 5′-to-3′-direction an ORF, an 3′-UTR moiety, an optional poly(A) sequence, an optional poly (C) sequence and an optional histone stem-loop sequence, or in 5′-to-3′-direction an 5′-UTR moiety, an ORF, an optional poly(A) sequence, an optional poly(C) sequence and an optional histone stem-loop sequence, or in 5′-to-3′-direction an 5′-UTR element, an ORF, a 3′-UTR element, an optional poly(A) sequence, an optional poly(C) sequence and an optional histone stem-loop sequence.

[0332] In a preferred embodiment, the optimized nucleic acid molecule according to the invention further comprises at least one histone stem-loop sequence.

[0333] Such histone stem-loop sequences are preferably selected from histone stem-loop sequences as disclosed in WO 2012/019780, whose disclosure is incorporated herewith by reference. Alternatively, such histone stem-loop sequences are preferably selected from histone stem-loop sequences as disclosed in WO 2013/143699, whose disclosure is incorporated herewith by reference

[0334] A histone stem-loop sequence, suitable to be used within the present invention, is preferably selected from at least one of the following formulae (I) or (II):

[chemical structure]

wherein:
[0335] stem1 or stem2 bordering elements N₁₋₆ is a consecutive sequence of 1 to 6, preferably of 2 to 6, more preferably of 2 to 5, even more preferably of 3 to 5, most preferably of 4 to 5 or 5 N, wherein each N is independently from another selected from a nucleotide selected from A, U, T, G and C, or a nucleotide analogue thereof;
[0336] stem1 [N₀₋₂GN₃₋₅] is reverse complementary or partially reverse complementary with element stem2, and is a consecutive sequence between of 5 to 7 nucleotides;
   [0337] wherein N₀₋₂ is a consecutive sequence of 0 to 2, preferably of 0 to 1, more preferably of 1 N, wherein each N is independently from another selected from a nucleotide selected from A, U, T, G and C or a nucleotide analogue thereof;
   [0338] wherein N₃₋₅ is a consecutive sequence of 3 to 5, preferably of 4 to 5, more preferably of 4 N, wherein each N is independently from another selected from a nucleotide selected from A, U, T, G and C or a nucleotide analogue thereof, and
   [0339] wherein G is guanosine or an analogue thereof, and may be optionally replaced by a cytidine or an analogue thereof, provided that its complementary nucleotide cytidine in stem2 is replaced by guanosine;
[0340] loop sequence [N₀₋₄(U/T)N₀₋₄] is located between elements stem1 and stem2, and is a consecutive sequence of 3 to 5 nucleotides, more preferably of 4 nucleotides;
   [0341] wherein each N₀₋₄ is independent from another a consecutive sequence of 0 to 4, preferably of 1 to 3, more preferably of 1 to 2 N, wherein each N is independently from another selected from a nucleotide selected from A, U, T, G and C or a nucleotide analogue thereof; and wherein U/T represents uridine, or optionally thymidine;
[0342] stem2 [N₃₋₅CN₀₋₂] is reverse complementary or partially reverse complementary with element stem1, and is a consecutive sequence between of 5 to 7 nucleotides;
   [0343] wherein N₃₋₅ is a consecutive sequence of 3 to 5, preferably of 4 to 5, more preferably of 4 N, wherein each N is independently from another selected from a nucleotide selected from A, U, T, G and C or a nucleotide analogue thereof;
   [0344] wherein N_{0.2} is a consecutive sequence of 0 to 2, preferably of 0 to 1, more preferably of 1 N, wherein each N is independently from another selected from a nucleotide selected from A, U, T, G or C or a nucleotide analogue thereof; and
   [0345] wherein C is cytidine or an analogue thereof, and may be optionally replaced by a guanosine or an analogue thereof provided that its complementary nucleoside guanosine in stem1 is replaced by cytidine;
      wherein
      stem1 and stem2 are capable of base pairing with each other forming a reverse complementary sequence, wherein base pairing may occur between stem1 and stem2, e.g. by Watson-Crick base pairing of nucleotides A and U/T or G and C or by non-Watson-Crick base pairing e.g. wobble base pairing, reverse Watson-Crick base pairing, Hoogsteen base pairing, reverse Hoogsteen base pairing or are capable of base pairing with each other forming a partially reverse complementary sequence, wherein an incomplete base pairing may occur between stem1 and stem2, on the basis that one or more bases in one stem do not have a complementary base in the reverse complementary sequence of the other stem.

[0346] According to a further preferred embodiment, the histone stem-loop sequence may be selected according to at least one of the following specific formulae (Ia) or (IIa):

[chemical structure]

wherein:
N, C, G, T and U are as defined above.

[0347] According to a further more particularly preferred embodiment of the first aspect, the optimized nucleic acid molecule sequence may comprise at least one histone stem-loop sequence according to at least one of the following specific formulae (Ib) or (IIb):

[chemical structure]

wherein:
N, C, G, T and U are as defined above.

[0348] A particular preferred histone stem-loop sequence is the sequence according to SEQ ID NO: 1731, or more preferably the corresponding RNA sequence.

[0349] 3.2.5 Cap

[0350] The optimized nucleic acid molecule according to the present invention may further comprise optionally a 5′-cap. The optional 5′-cap is preferably located 5′ to the ORF, more preferably 5′ to the at least one 5′-UTR (if present) within the optimized nucleic acid molecule according to the present invention. This embodiment is particularly useful when the nucleic acid molecule is an RNA molecule. A 5′-cap may be added in a cell, or may alternatively be added in vitro. Further details of a 5′-cap useful in the present invention are described below in the context of chemical modifications.

[0351] 3.2.6 Polyadenylation Signal or Poly(A) Sequence

[0352] Preferably, the optimized nucleic acid molecule according to the present invention further comprises a poly(A) sequence and/or a polyadenylation signal. A poly(A) sequence is particularly useful when the nucleic acid molecule is an RNA molecule, and is preferably present in an RNA molecule comprising a 3′-UTR. Preferably, the poly(A) sequence is located 3′ to the 3′-UTR moiety, more preferably the poly(A) sequence is connected to the 3′-end of a 3′-UTR moiety. The connection may be direct or indirect, for example, via a stretch of 2, 4, 6, 8, 10, 20 etc. nucleotides, such as via a linker of 1-50, preferably of 1-20 nucleotides, e.g. comprising or consisting of one or more restriction sites. However, even if the optimized nucleic acid molecule according to the present invention does not comprise a 3′-UTR, for example if it only comprises at least one 5′-UTR moiety, it preferably still comprises a poly(A) sequence and/or a polyadenylation signal.

[0353] In one embodiment, a DNA molecule comprising an ORF, optionally followed by a 3′ UTR, may contain a stretch of thymidine nucleotides which can be transcribed into a poly(A) sequence in the resulting mRNA. The length of the poly(A) sequence may vary. For example, the poly(A) sequence may have a length of about 20 adenine nucleotides up to about 300 adenine nucleotides, preferably of about 40 to about 200 adenine nucleotides, more preferably from about 50 to about 100 adenine nucleotides, such as about 60, 70, 80, 90 or 100 adenine nucleotides. Most preferably, the nucleic acid of the invention comprises a poly(A) sequence of about 60 to about 70 nucleotides, most preferably 64 adenine nucleotides.

[0354] In one embodiment, the optional polyadenylation signal is located downstream of the 3′ of the 3′-UTR moiety. Preferably, the polyadenylation signal comprises the consensus sequence NN(U/T)ANA, with N=A or U, preferably AA(U/T)AAA or A(U/T)(U/T)AAA. Such consensus sequence may be recognised by most animal and bacterial cell-systems, for example by the polyadenylation-factors, such as cleavage/polyadenylation specificity factor (CPSF) cooperating with CstF, PAP, PAB2, CFI and/or CFII. Preferably, the polyadenylation signal, preferably the consensus sequence NNUANA, is located less than about 50 nucleotides, more preferably less than about 30 bases, most preferably less than about 25 bases, for example 21 bases, downstream of the 3′-end of the 3′-UTR moiety or of the ORF, if no 3′-UTR moiety is present.

[0355] Transcription of an optimized nucleic acid molecule according to the present invention, e.g. of an artificial DNA molecule, comprising a polyadenylation signal downstream of the 3′-UTR moiety (or of the ORF) will result in a premature-RNA containing the polyadenylation signal downstream of its 3′-UTR moiety (or of the ORF).

[0356] Using an appropriate transcription system will then lead to attachment of a poly(A) sequence to the premature-RNA. For example, the inventive optimized nucleic acid molecule may be a DNA molecule comprising a 3′-UTR moiety as described above and a polyadenylation signal, which may result in polyadenylation of an RNA upon transcription of this DNA molecule. Accordingly, a resulting RNA may comprise a combination of a 3′-UTR moiety and a poly(A) sequence.

[0357] Potential transcription systems are in vitro transcription systems or cellular transcription systems etc. Accordingly, transcription of an optimized nucleic acid molecule according to the invention, e.g. transcription of an optimized nucleic acid molecule comprising an open reading frame, a 3′-UTR moiety and/or a 5′-UTR moiety and optionally a polyadenylation-signal, may result in an mRNA molecule comprising an open reading frame, a 3′-UTR moiety and optionally a poly(A) sequence.

[0358] Accordingly, the invention also provides an optimized nucleic acid molecule, which is an mRNA molecule comprising an open reading frame, a 3′-UTR moiety as described above and/or a 5′-UTR moiety as described above and optionally a poly(A) sequence.

[0359] In another embodiment, the 3′-UTR of the optimized nucleic acid molecule according to the invention does not comprise a polyadenylation signal or a poly(A) sequence. Further preferably, the optimized nucleic acid molecule according to the invention does not comprise a polyadenylation signal or a poly(A) sequence. More preferably, the 3′-UTR of the optimized nucleic acid molecule, or the inventive optimized nucleic acid molecule as such, does not comprise a polyadenylation signal, in particular it does not comprise the polyadenylation signal AAU/TAAA.

[0360] 3.2.7 Additional Modules

[0361] Furthermore, the optimized nucleic acid molecule may comprise additional 5′-moieties, preferably a promoter or a promoter containing-sequence. The promoter may drive and or regulate transcription of the optimized nucleic acid molecule according to the present invention, for example of an artificial DNA-molecule according to the present invention.

[0362] Suitable promoters are known in the art.

[0363] Alternatively, any polynucleotide may be selected which is characterized by at least 80% identity, at least 85% identity, preferably at least 90% identity, and more preferably at least 95% identity to any of the promoter sequences.

[0364] 3.2.8 Hairpin Moieties:

[0365] The optimized nucleic acid molecule according to the present invention may further comprise at least one hairpin moiety. Hairpin moieties can support RNA folding, protect mRNA from degradation, or serve as a recognition motif for RNA binding proteins etc. Hairpin moieties may be derived from naturally occurring hairpin structures (e.g., as present in UTR regions).

[0366] 3.2.8 Moieties for RNA Binding Proteins:

[0367] The optimized nucleic acid molecule according to the present invention may further comprise at least one moiety for RNA binding proteins. In essence, RNA-binding proteins (often abbreviated as RBPs) are proteins that bind to single stranded RNA in cells and participate in forming ribonucleoprotein complexes. RBPs contain various structural motifs, such as RNA recognition motif (RRM), dsRNA binding domain, zinc finger and others. RBPs have crucial roles in various cellular processes such as: cellular function, transport and localization. They especially play a major role in post-transcriptional control of RNAs, such as: splicing, polyadenylation, mRNA stabilization, mRNA localization and translation. Such moieties may be incorporated into the optimized nucleic acid to increase the translation rate of the construct into protein. Furthermore, moieties for RNA binding proteins may be introduced into the optimized nucleic acid to increase the cellular stability of the construct. Such optimized nucleic acids may have a prolonged half-life which may result in a prolonged protein expression in vivo.

[0368] 3.2.8 Moiety that Prevents 3′-5′ Degradation:

[0369] The optimized nucleic acid molecule according to the present invention may further comprise a moiety that prevents 3′-5′ degradation. Such moieties may comprise tailored oligonucleotides, potentially comprising modified nucleotides. Such moiety that prevents 3′-5′ degradation may be incorporated into an optimized nucleic acid to increase the cellular stability of the construct. Such optimized nucleic acids may have a prolonged half-life which may result in a prolonged protein expression in vivo.

[0370] 3.2.9 Moieties that Regulate RNA Decay Rates:

[0371] The optimized nucleic acid molecule according to the present invention may further comprise moieties that regulate RNA decay rates. For example, AU-rich elements located on the 3′UTR of mRNAs modulate mRNA stability, both as stabilizing and destabilizing elements. Elements that destabilize the optimized nucleic acid construct may be introduced into the RNA for application where a fast decay of the RNA is desired, e.g., when the expression of the encoded target protein has to be restricted. Elements that stabilize the optimized nucleic acid construct may be introduced into the RNA for application where a decay of the RNA is not desired, e.g., when the expression of the encoded target protein has to be prolonged.

[0372] 4. Modifications

[0373] The nucleic acid molecule of the present invention may be modified in that a molecular entity (building block) found in a respective starting nucleic acid (e.g. wild-type nucleic acid) is replaced by a different molecular entity (building block). A building block or molecular entity may be a deoxyribonucleotide or ribonucleotide or non-naturally occurring nucleotide.

[0374] The replacing molecular entity may be a different—naturally occurring—deoxyribonucleotide or ribonucleotide, e.g. A, C, G, T, U. Embodiments of replacement by a different—but naturally occurring—molecular entity include G/C modification and codon optimization, each as described below.

[0375] Alternatively, the replacing molecular entity may be a synthetic entity. Embodiments include the chemical modifications described below.

[0376] 4.1 Substitution by Naturally Occurring Molecular Entities

[0377] The replacing molecular entity (building block) may be a naturally occurring deoxyribonucleotide or ribonucleotide, so that one naturally occurring nucleotide is replaced by a different deoxyribonucleotide or ribonucleotide. Embodiments thereof include G/C modification and codon optimization:

[0378] 4.1.1 G/C Modification

[0379] Preferably, the optimized nucleic acid molecule according to the present invention, preferably the open reading frame, is at least partially G/C modified. The G/C content of the open reading frame of an optimized nucleic acid molecule according to the present invention may be increased compared to the G/C content of the open reading frame of a corresponding wild-type sequence, preferably by taking advantage of the degeneration of the genetic code. Thus, the amino acid sequence (polypeptide or protein) encoded by the optimized nucleic acid molecule is preferably not altered, despite the G/C modification. The codons of the coding sequence or the whole optimized nucleic acid molecule, e.g. an mRNA, may therefore be varied compared to the wild-type coding sequence, such that they include an increased amount of G/C nucleotides while the translated amino acid sequence is maintained. Due to the fact that several codons code for one and the same amino acid (so-called degeneration of the genetic code), it is feasible to alter codons while not altering the encoded peptide/protein sequence (so-called alternative codon usage). Hence, it is possible to specifically introduce certain codons (in exchange for the respective wild-type codons encoding the same amino acid), which are more favourable with respect to stability of RNA and/or with respect to codon usage in a subject (so-called codon optimization).

[0380] Depending on the amino acid to be encoded by the coding region of the inventive optimized nucleic acid molecule as defined herein, there are various possibilities for modification of the nucleic acid sequence, e.g. the open reading frame, compared to its wild-type coding region. In the case of amino acids, which are encoded by codons which contain exclusively G or C nucleotides, no modification of the codon is necessary. Thus, the codons for Pro (CCC or CCG), Arg (CGC or CGG), Ala (GCC or GCG) and Gly (GGC or GGG) require no modification, since no A or U/T is present.

[0381] In contrast, codons which contain A and/or U/T nucleotides may be modified by substitution of other codons which code for the same amino acids but contain no A and/or U/T. For example

the codons for Pro can be modified from CC(U/T) or CCA to CCC or CCG;
the codons for Arg can be modified from CG(U/T) or CGA or AGA or AGG to CGC or CGG;
the codons for Ala can be modified from GC(U/T) or GCA to GCC or GCG;
the codons for Gly can be modified from GG(U/T) or GGA to GGC or GGG.

[0382] In other cases, although A or (U/T) nucleotides cannot be eliminated from the codons, it is however possible to decrease the A and (U/T) content by using codons which contain a lower content of A and/or (U/T) nucleotides. Examples of these are:

[0383] The codons for Phe can be modified from (U/T)(U/T)(U/T) to (U/T) (U/T)C;

the codons for Leu can be modified from (U/T) (U/T)A, (U/T) (U/T)G, C(U/T) (U/T) or C(U/T)A to C(U/T)C or C(U/T)G;
the codons for Ser can be modified from (U/T)C(U/T) or (U/T)CA or AG(U/T) to (U/T)CC, (U/T)CG or AGC;
the codon for Tyr can be modified from (U/T)A(U/T) to (U/T)AC;
the codon for Cys can be modified from (U/T)G(U/T) to (U/T)GC;
the codon for His can be modified from CA(U/T) to CAC;
the codon for Gln can be modified from CAA to CAG;
the codons for Ile can be modified from A(U/T)(U/T) or A(U/T)A to A(U/T)C;
the codons for Thr can be modified from AC(U/T) or ACA to ACC or ACG;
the codon for Asn can be modified from AA(U/T) to AAC;
the codon for Lys can be modified from AAA to AAG;
the codons for Val can be modified from G(U/T)(U/T) or G(U/T)A to G(U/T)C or G(U/T)G;
the codon for Asp can be modified from GA(U/T) to GAC;
the codon for Glu can be modified from GAA to GAG;
the stop codon (U/T)AA can be modified to (U/T)AG or (U/T)GA.

[0384] In the case of the codons for Met (A(U/T)G) and Trp ((U/T)GG), on the other hand, there is no possibility of sequence modification without altering the encoded amino acid sequence.

[0385] The substitutions listed above can be used either individually or in all possible combinations to increase the G/C content of the open reading frame of the optimized nucleic acid molecule of the invention as defined herein, compared to its particular wild-type open reading frame (i.e. the original sequence). Thus, for example, all codons for Thr occurring in the wild-type sequence can be modified to ACC (or ACG).

[0386] Preferably, the G/C content of the open reading frame of the optimized nucleic acid molecule of the invention as defined herein is increased by at least 7%, more preferably by at least 15%, particularly preferably by at least 20%, compared to the G/C content of the wild-type coding region without altering the encoded amino acid sequence, i.e. using the degeneracy of the genetic code. According to a specific embodiment at least 5%, 10%, 20%, 30%, 40%, 50%, 60%, more preferably at least 70%, even more preferably at least 80% and most preferably at least 90%, 95% or even 100% of the substitutable codons in the open reading frame of the optimized nucleic acid molecule or a fragment, variant or derivative thereof are substituted, thereby increasing the G/C content of said open reading frame.

[0387] In this context, it is particularly preferable to increase the G/C content of the open reading frame of the inventive optimized nucleic acid molecule as defined herein, to the maximum (i.e. 100% of the substitutable codons), compared to the wild-type open reading frame, without altering the encoded amino acid sequence.

[0388] 4.1.2 Adaptation of the Codon-Usage

[0389] Furthermore, the open reading frame is preferably at least partially codon-optimized. Codon-optimization is based on the finding that the translation efficiency may be determined by a different frequency in the occurrence of transfer RNAs (tRNAs) in cells. Thus, if so-called “rare codons” are present in the coding region of the optimized nucleic acid molecule as defined herein, to an increased extent, the translation of the corresponding modified nucleic acid sequence is less efficient than in the case where codons coding for relatively “frequent” tRNAs are present.

[0390] Thus, the open reading frame of the optimized nucleic acid molecule is preferably modified compared to the corresponding wild-type coding region such that at least one codon of the wild-type sequence which codes for a tRNA which is relatively rare in the cell is exchanged for a codon which codes for a tRNA which is comparably frequent in the cell and carries the same amino acid as the relatively rare tRNA. By this modification, the open reading frame of the optimized nucleic acid molecule as defined herein, is modified such that codons for which frequently occurring tRNAs are available may replace codons which correspond to rare tRNAs. In other words, according to the invention, by such a modification all codons of the wild-type open reading frame which code for a rare tRNA may be exchanged for a codon which codes for a tRNA which is more frequent in the cell and which carries the same amino acid as the rare tRNA. Which tRNAs occur relatively frequently in the cell and which, in contrast, occur relatively rarely is known to a person skilled in the art; cf. e.g. Akashi, Curr. Opin. Genet. Dev. 2001, 11(6): 660-666. Accordingly, preferably, the open reading frame is codon-optimized, preferably with respect to the system in which the optimized nucleic acid molecule according to the present invention is to be expressed, preferably with respect to the system in which the optimized nucleic acid molecule according to the present invention is to be translated. Preferably, the codon usage of the open reading frame is codon-optimized according to mammalian codon usage, more preferably according to human codon usage. Preferably, the open reading frame is codon-optimized and G/C-content modified.

[0391] 4.2 Chemical Modification

[0392] The polynucleotide of the present invention can comprise one or more chemical modification(s). The chemical modification is present as an alternative or in addition (preferably in addition) to the modules of the optimized nucleic acid molecule as described above. Chemical modification, generally, refers to a modified nucleotide, so that a modified nucleotide is a structural feature of such optimized nucleic acid molecule. In such case, at least one nucleotide of a nucleic acid molecule (e.g. deoxyribonucleic acid molecule or ribonucleic acid molecule) is altered. Typically, chemical modification is introduced into a nucleic acid molecule by incorporating a chemically modified building block at the stage of synthesizing (in vivo or in vitro) the respective nucleic acid molecule.

[0393] In general, in order to further improve degradation resistance, e.g. resistance to in vivo (or in vitro as defined herein) degradation by an exo- or endonuclease, and/or for further improving stability of protein expression from the optimized nucleic acid molecule according to the present invention, the optimized nucleic acid molecule may further comprise modifications, such as backbone modifications, sugar modifications and/or base modifications, e.g., lipid-modifications or the like.

[0394] The term “modification” as used herein with regard to the optimized nucleic acid molecule may refer to chemical modifications comprising backbone modifications as well as sugar modifications or base modifications.

[0395] In this context, the optimized nucleic acid molecule, preferably an RNA molecule, as defined herein may contain nucleotide analogues/modifications, e.g. backbone modifications, sugar modifications or base modifications. A backbone modification in connection with the present invention is a modification, in which phosphates of the backbone of the nucleotides contained in a nucleic acid molecule as defined herein are chemically modified. A sugar modification in connection with the present invention is a chemical modification of the sugar of the nucleotides of the nucleic acid molecule as defined herein. Furthermore, a base modification in connection with the present invention is a chemical modification of the base moiety of the nucleotides of the nucleic acid molecule of the nucleic acid molecule. In this context, nucleotide analogues or modifications are preferably selected from nucleotide analogues which are applicable for transcription and/or translation.

[0396] Preferably, the transcription and/or the translation of the optimized nucleic acid molecule according to the present invention is not significantly impaired by the modifications.

[0397] Generally, the optimized nucleic acid molecule of the present invention may comprise any native (=naturally occurring) nucleotide, e.g. guanosine, uracil, adenosine, and/or cytosine or an analogue thereof. In this respect, nucleotide analogues are defined as natively and non-natively occurring variants of the naturally occurring nucleotides adenosine, cytosine, thymidine, guanosine and uridine. Accordingly, analogues are e.g. chemically derivatized nucleotides with non-natively occurring functional groups, which are preferably added to or deleted from the naturally occurring nucleotide or which substitute the naturally occurring functional groups of a nucleotide. Accordingly, each component of the naturally occurring nucleotide may be modified, namely the base component, the sugar (ribose or deoxyribose) component and/or the phosphate component forming the backbone (see above) of the nucleic acid molecule. Analogues of guanosine, uridine, adenosine, thymidine and cytosine include, without implying any limitation, any natively occurring or non-natively occurring guanosine, uridine, adenosine, thymidine or cytosine that has been altered e.g. chemically, for example by acetylation, methylation, hydroxylation, etc., including 1-methyl-adenosine, 1-methyl-guanosine, 1-methyl-inosine, 2,2-dimethyl-guanosine, 2,6-diaminopurine, 2′-Amino-2′-deoxyadenosine, 2′-Amino-2′-deoxycytidine, 2′-Amino-2′-deoxyguanosine, 2′-Amino-2′-deoxyuridine, 2-Amino-6-chloropurineriboside, 2-Aminopurine-riboside, 2′-Araadenosine, 2′-Aracytidine, 2′-Arauridine, 2′-Azido-2′-deoxyadenosine, 2′-Azido-2′-deoxycytidine, 2′-Azido-2′-deoxyguanosine, 2′-Azido-2′-deoxyuridine, 2-Chloroadenosine, 2′-Fluoro-2′-deoxyadenosine, 2′-Fluoro-2′-deoxycytidine, 2′-Fluoro-2′-deoxyguanosine, 2′-Fluoro-2′-deoxyuridine, 2′-Fluorothymidine, 2-methyl-adenosine, 2-methyl-guanosine, 2-methyl-thio-N6-isopenenyl-adenosine, 2′-O-Methyl-2-aminoadenosine, 2′-O-Methyl-2′-deoxyadenosine, 2′-O-Methyl-2′-deoxycytidine, 2′-O-Methyl-2′-deoxyguanosine, 2′-O-Methyl-2′-deoxyuridine, 2′-O-Methyl-5-methyluridine, 2′-O-Methylinosine, 2′-O-Methylpseudouridine, 2-Thiocytidine, 2-thio-cytosine, 3-methyl-cytosine, 4-acetyl-cytosine, 4-Thiouridine, 5-(carboxyhydroxymethyl)-uracil, 5,6-Dihydrouridine, 5-Aminoallylcytidine, 5-Aminoallyl-deoxy-uridine, 5-Bromouridine, 5-carboxymehtylaminomethyl-2-thio-uracil, 5-carboxymethylamonomethyl-uracil, 5-Chloro-Ara-cytosine, 5-Fluoro-uridine, 5-lodouridine, 5-methoxycarbonylmethyl-uridine, 5-methoxy-uridine, 5-methyl-2-thio-uridine, 6-Azacytidine, 6-Azauridine, 6-Chloro-7-deaza-guanosine, 6-Chloropurineriboside, 6-Mercapto-guanosine, 6-Methyl-mercaptopurine-riboside, 7-Deaza-2′-deoxy-guanosine, 7-Deazaadenosine, 7-methyl-guanosine, 8-Azaadenosine, 8-Bromo-adenosine, 8-Bromo-guanosine, 8-Mercapto-guanosine, 8-Oxoguanosine, Benzimidazole-riboside, Beta-D-mannosyl-queosine, Dihydro-uracil, Inosine, N1-Methyladenosine, N6-([6-Aminohexyl]carbamoylmethyl)-adenosine, N6-isopentenyl-adenosine, N6-methyl-adenosine, N7-Methyl-xanthosine, N-uracil-5-oxyacetic acid methyl ester, Puromycin, Queosine, Uracil-5-oxyacetic acid, Uracil-5-oxyacetic acid methyl ester, Wybutoxosine, Xanthosine, and Xylo-adenosine. The preparation of such analogues is known to a person skilled in the art, for example from U.S. Pat. No. 4,373,071, U.S. Pat. No. 4,401,796, U.S. Pat. No. 4,415,732, U.S. Pat. No. 4,458,066, U.S. Pat. No. 4,500,707, U.S. Pat. No. 4,668,777, U.S. Pat. No. 4,973,679, U.S. Pat. No. 5,047,524, U.S. Pat. No. 5,132,418, U.S. Pat. No. 5,153,319, U.S. Pat. Nos. 5,262,530 and 5,700,642. In the case of an analogue as described above, particular preference may be given according to certain embodiments of the invention to those analogues that increase the protein expression of the encoded peptide or protein or that increase the immunogenicity of the optimized nucleic acid molecule of the invention and/or do not interfere with a further modification of the optimized nucleic acid molecule that has been introduced.

[0398] In a particularly preferred embodiment, the optimized nucleic acid molecule according to the invention may further comprise one or more of the modifications described in the following:

[0399] 4.2.1. Sugar Modifications:

[0400] The modified nucleosides and nucleotides, which may be incorporated into the optimized nucleic acid molecule, preferably an RNA, as described herein, can be modified in the sugar moiety. For example, the 2′ hydroxyl group (OH) of an RNA molecule can be modified or replaced with a number of different “oxy” or “deoxy” substituents. Examples of “oxy”-2′ hydroxyl group modifications include, but are not limited to, alkoxy or aryloxy (—OR, e.g., R═H, alkyl, cycloalkyl, aryl, aralkyl, heteroaryl or sugar); polyethyleneglycols (PEG), —O(CH₂CH₂O)ₙCH₂CH₂OR; “locked” nucleic acids (LNA) in which the 2′ hydroxyl is connected, e.g., by a methylene bridge, to the 4′ carbon of the same ribose sugar; and amino groups (—O-amino, wherein the amino group, e.g., NRR, can be alkylamino, dialkylamino, heterocyclyl, arylamino, diarylamino, heteroarylamino, or diheteroaryl amino, ethylene diamine, polyamino) or aminoalkoxy.

[0401] “Deoxy” modifications include hydrogen, amino (e.g. NH2; alkylamino, dialkylamino, heterocyclyl, arylamino, diaryl amino, heteroaryl amino, diheteroaryl amino, or amino acid); or the amino group can be attached to the sugar through a linker, wherein the linker comprises one or more of the atoms C, N, and O.

[0402] The sugar group can also contain one or more carbons that possess the opposite stereochemical configuration than that of the corresponding carbon in ribose. Thus, a modified nucleic acid molecule can include nucleotides containing, for instance, arabinose as the sugar.

[0403] 4.2.2 Backbone Modifications:

[0404] The phosphate backbone may further be modified in the modified nucleosides and nucleotides, which may be incorporated into the optimized nucleic acid molecule, preferably an RNA, as described herein. The phosphate groups of the backbone can be modified by replacing one or more of the oxygen atoms with a different substituent. Further, the modified nucleosides and nucleotides can include the full replacement of an unmodified phosphate moiety with a modified phosphate as described herein. Examples of modified phosphate groups include, but are not limited to, phosphorothioate, phosphoroselenates, borano phosphates, borano phosphate esters, hydrogen phosphonates, phosphoroamidates, alkyl or aryl phosphonates and phosphotriesters. Phosphorodithioates have both non-linking oxygens replaced by sulfur. The phosphate linker can also be modified by the replacement of a linking oxygen with nitrogen (bridged phosphoroamidates), sulfur (bridged phosphorothioates) and carbon (bridged methylene-phosphonates).

[0405] 4.2.3 Base Modifications:

[0406] The modified nucleosides and nucleotides, which may be incorporated into the optimized nucleic acid molecule, preferably an RNA molecule, as described herein, can further be modified in the nucleobase moiety. Examples of nucleobases found in RNA include, but are not limited to, adenine, guanine, cytosine and uracil. For example, the nucleosides and nucleotides described herein can be chemically modified on the major groove face. In some embodiments, the major groove chemical modifications can include an amino group, a thiol group, an alkyl group, or a halo group.

[0407] In particularly preferred embodiments of the present invention, the nucleotide analogues/modifications are selected from base modifications, which are preferably selected from 2-amino-6-chloropurineriboside-5′-triphosphate, 2-Aminopurine-riboside-5′-triphosphate; 2-aminoadenosine-5′-triphosphate, 2′-Amino-2′-deoxycytidine-triphosphate, 2-thiocytidine-5′-triphosphate, 2-thiouridine-5′-triphosphate, 2′-Fluorothymidine-5′-triphosphate, 2′-O-Methyl inosine-5′-triphosphate 4-thiouridine-5′-triphosphate, 5-aminoallylcytidine-5′-triphosphate, 5-aminoallyluridine-5′-triphosphate, 5-bromocytidine-5′-triphosphate, 5-bromouridine-5′-triphosphate, 5-Bromo-2′-deoxycytidine-5′-triphosphate, 5-Bromo-2′-deoxyuridine-5′-triphosphate, 5-iodocytidine-5′-triphosphate, 5-lodo-2′-deoxycytidine-5′-triphosphate, 5-iodouridine-5′-triphosphate, 5-lodo-2′-deoxyuridine-5′-triphosphate, 5-methylcytidine-5′-triphosphate, 5-methyluridine-5′-triphosphate, 5-Propynyl-2′-deoxycytidine-5′-triphosphate, 5-Propynyl-2′-deoxyuridine-5′-triphosphate, 6-azacytidine-5′-triphosphate, 6-azauridine-5′-triphosphate, 6-chloropurineriboside-5′-triphosphate, 7-deazaadenosine-5′-triphosphate, 7-deazaguanosine-5′-triphosphate, 8-azaadenosine-5′-triphosphate, 8-azidoadenosine-5′-triphosphate, benzimidazole-riboside-5′-triphosphate, N1-methyladenosine-5′-triphosphate, N1-methylguanosine-5′-triphosphate, N6-methyladenosine-5′-triphosphate, O6-methylguanosine-5′-triphosphate, pseudouridine-5′-triphosphate, or puromycin-5′-triphosphate, xanthosine-5′-triphosphate. Particular preference is given to nucleotides for base modifications selected from the group of base-modified nucleotides consisting of 5-methylcytidine-5′-triphosphate, 7-deazaguanosine-5′-triphosphate, 5-bromocytidine-5′-triphosphate, and pseudouridine-5′-triphosphate.

[0408] In some embodiments, modified nucleosides include pyridin-4-one ribonucleoside, 5-aza-uridine, 2-thio-5-aza-uridine, 2-thiouridine, 4-thio-pseudouridine, 2-thio-pseudouridine, 5-hydroxyuridine, 3-methyluridine, 5-carboxymethyl-uridine, 1-carboxymethyl-pseudouridine, 5-propynyl-uridine, 1-propynyl-pseudouridine, 5-taurinomethyluridine, 1-taurinomethyl-pseudouridine, 5-taurinomethyl-2-thio-uridine, 1-taurinomethyl-4-thio-uridine, 5-methyl-uridine, 1-methyl-pseudouridine, 4-thio-1-methyl-pseudouridine, 2-thio-1-methyl-pseudouridine, 1-methyl-1-deaza-pseudouridine, 2-thio-1-methyl-1-deaza-pseudouridine, dihydrouridine, dihydropseudouridine, 2-thio-dihydrouridine, 2-thio-dihydropseudouridine, 2-methoxyuridine, 2-methoxy-4-thio-uridine, 4-methoxy-pseudouridine, and 4-methoxy-2-thio-pseudouridine.

[0409] In some embodiments, modified nucleosides include 5-aza-cytidine, pseudoisocytidine, 3-methyl-cytidine, N4-acetylcytidine, 5-formylcytidine, N4-methylcytidine, 5-hydroxymethylcytidine, 1-methyl-pseudoisocytidine, pyrrolo-cytidine, pyrrolo-pseudoisocytidine, 2-thio-cytidine, 2-thio-5-methyl-cytidine, 4-thio-pseudoisocytidine, 4-thio-1-methyl-pseudoisocytidine, 4-thio-1-methyl-1-deaza-pseudoisocytidine, 1-methyl-1-deaza-pseudoisocytidine, zebularine, 5-aza-zebularine, 5-methyl-zebularine, 5-aza-2-thio-zebularine, 2-thio-zebularine, 2-methoxy-cytidine, 2-methoxy-5-methyl-cytidine, 4-methoxy-pseudoisocytidine, and 4-methoxy-1-methyl-pseudoisocytidine.

[0410] In other embodiments, modified nucleosides include 2-aminopurine, 2,6-diaminopurine, 7-deaza-adenine, 7-deaza-8-aza-adenine, 7-deaza-2-aminopurine, 7-deaza-8-aza-2-aminopurine, 7-deaza-2,6-diaminopurine, 7-deaza-8-aza-2,6-diaminopurine, 1-methyladenosine, N6-methyladenosine, N6-isopentenyladenosine, N6-(cis-hydroxyisopentenyl)adenosine, 2-methylthio-N6-(cis-hydroxyisopentenyl) adenosine, N6-glycinylcarbamoyladenosine, N6-threonylcarbamoyladenosine, 2-methylthio-N6-threonyl carbamoyladenosine, N6,N6-dimethyladenosine, 7-methyladenine, 2-methylthio-adenine, and 2-methoxy-adenine.

[0411] In other embodiments, modified nucleosides include inosine, 1-methyl-inosine, wyosine, wybutosine, 7-deaza-guanosine, 7-deaza-8-aza-guanosine, 6-thio-guanosine, 6-thio-7-deaza-guanosine, 6-thio-7-deaza-8-aza-guanosine, 7-methyl-guanosine, 6-thio-7-methyl-guanosine, 7-methylinosine, 6-methoxy-guanosine, 1-methylguanosine, N2-methylguanosine, N2,N2-dimethylguanosine, 8-oxo-guanosine, 7-methyl-8-oxo-guanosine, I-methyl-6-thio-guanosine, N2-methyl-6-thio-guanosine, and N2,N2-dimethyl-6-thio-guanosine.

[0412] In some embodiments, the nucleotide can be modified on the major groove face and can include replacing hydrogen on C-5 of uracil with a methyl group or a halo group.

[0413] In specific embodiments, a modified nucleoside is 5′-O-(1-Thiophosphate)-Adenosine, 5′-O-(1-Thiophosphate)-Cytidine, 5′-O-(1-Thiophosphate)-Guanosine, 5′-O-(1-Thiophosphate)-Uridine or 5′-O-(1-Thiophosphate)-Pseudouridine.

[0414] In further specific embodiments the optimized nucleic acid molecule, preferably an RNA molecule, may comprise nucleoside modifications selected from 6-aza-cytidine, 2-thio-cytidine, alpha-thio-cytidine, Pseudo-iso-cytidine, 5-aminoallyl-uridine, 5-iodo-uridine, N1-methyl-pseudouridine, 5,6-dihydrouridine, alpha-thio-uridine, 4-thio-uridine, 6-aza-uridine, 5-hydroxy-uridine, deoxy-thymidine, 5-methyl-uridine, Pyrrolo-cytidine, inosine, alpha-thio-guanosine, 6-methyl-guanosine, 5-methyl-cytdine, 8-oxo-guanosine, 7-deaza-guanosine, N1-methyl-adenosine, 2-amino-6-Chloro-purine, N6-methyl-2-amino-purine, Pseudo-iso-cytidine, 6-Chloro-purine, N6-methyl-adenosine, alpha-thio-adenosine, 8-azido-adenosine, 7-deaza-adenosine.

[0415] 4.2.4 Lipid Modification:

[0416] According to a further embodiment, the optimized nucleic acid molecule, preferably an RNA, as defined herein can contain a lipid modification. Such a lipid-modified RNA typically comprises an RNA as defined herein. Such a lipid-modified RNA molecule as defined herein typically further comprises at least one linker covalently linked with that RNA molecule, and at least one lipid covalently linked with the respective linker. Alternatively, the lipid-modified RNA molecule comprises at least one RNA molecule as defined herein and at least one (bifunctional) lipid covalently linked (without a linker) with that RNA molecule. According to a third alternative, the lipid-modified RNA molecule comprises an optimized nucleic acid molecule, preferably an RNA molecule, as defined herein, at least one linker covalently linked with that RNA molecule, and at least one lipid covalently linked with the respective linker, and also at least one (bifunctional) lipid covalently linked (without a linker) with that RNA molecule. In this context, it is particularly preferred that the lipid modification is present at the terminal ends of a linear RNA sequence.

[0417] 4.2.5 Modification of the 5′-End of the RNA:

[0418] According to another preferred embodiment of the invention, the optimized nucleic acid molecule, preferably an RNA molecule, as defined herein, can be modified by the addition of a so-called “5′ cap” structure.

[0419] A 5′-cap is an entity, typically a modified nucleotide entity, which generally “caps” the 5′-end of a mature mRNA. A 5′-cap may typically be formed by a modified nucleotide, particularly by a derivative of a guanine nucleotide. Preferably, the 5′-cap is linked to the 5′-terminus via a 5′-5′-triphosphate linkage. A 5′-cap may be methylated, e.g. m7GpppN, wherein N is the terminal 5′ nucleotide of the nucleic acid carrying the 5′-cap, typically the 5′-end of an RNA. m7GpppN is the 5′-cap structure which naturally occurs in mRNA transcribed by polymerase II and is therefore not considered as modification comprised in the modified RNA according to the invention. This means the optimized nucleic acid molecule, preferably an RNA molecule, according to the present invention may comprise an m7GpppN as 5′-cap, but additionally the optimized nucleic acid molecule, preferably an RNA molecule, comprises at least one further modification as defined herein.

[0420] Further examples of 5′cap structures include glyceryl, inverted deoxy abasic residue (moiety), 4′,5′ methylene nucleotide, 1-(beta-D-erythrofuranosyl) nucleotide, 4′-thio nucleotide, carbocyclic nucleotide, 1,5-anhydrohexitol nucleotide, L-nucleotides, alpha-nucleotide, modified base nucleotide, threo-pentofuranosyl nucleotide, acyclic 3′,4′-seco nucleotide, acyclic 3,4-dihydroxybutyl nucleotide, acyclic 3,5 dihydroxypentyl nucleotide, 3′-3′-inverted nucleotide moiety, 3′-3′-inverted abasic moiety, 3′-2′-inverted nucleotide moiety, 3′-2′-inverted abasic moiety, 1,4-butanediol phosphate, 3′-phosphoramidate, hexylphosphate, aminohexyl phosphate, 3′-phosphate, 3′phosphorothioate, phosphorodithioate, or bridging or non-bridging methylphosphonate moiety. These modified 5′-cap structures are regarded as at least one modification comprised in the optimized nucleic acid molecule, preferably in an RNA molecule, according to the present invention.

[0421] Particularly preferred modified 5′-cap structures are CAP1 (methylation of the ribose of the adjacent nucleotide of m7G), cap2 (additional methylation of the ribose of the 2^{nd} nucleotide downstream of the m7G), cap3 (additional methylation of the ribose of the 3^{rd} nucleotide downstream of the m7G), cap4 (additional methylation of the ribose of the 4^{th} nucleotide downstream of the m7G), ARCA (anti-reverse cap analogue, modified ARCA (e.g. phosphothioate modified ARCA), inosine, N1-methyl-guanosine, 2′-fluoro-guanosine, 7-deaza-guanosine, 8-oxo-guanosine, 2-amino-guanosine, LNA-guanosine, and 2-azido-guanosine.

[0422] 5. Combinations; Methods for Making Combinations

[0423] The methods of making the optimized nucleic acid molecule) of the invention (i.e. any and all nucleic molecule as described in this specification) comprise at least the following key step (2):

[0424] (2) Combining of at least two nucleic acid modules (moieties), to form a combined nucleic acid molecule. The combined nucleic acid molecule is preferably a chimeric molecule.

[0425] At least one of these moieties encodes a protein or polypeptide of interest. The combined nucleic acid molecule comprises the two moieties in functional relationship to each other. For example, when a further moiety encoding a polypeptide or protein of interest is combined with said protein or polypeptide of interest, then the combination occurs such that the combined nucleic acid molecule encodes the two protein elements or polypeptide elements in functional relationship to each other, e.g. as fusion protein. For example, when a non-coding moiety, i.e. not encoding any polypeptide or protein, is combined with said protein or polypeptide of interest, then the combination occurs such that the combined nucleic acid molecule encodes protein or polypeptide of interest in functional relationship to the non-coding moiety, e.g. such that the non-coding moiety beneficially influences translation of the protein or polypeptide of interest, or beneficially influences any other functional property, such as RNA stability. Methods for making combined nucleic acid molecules are well established in the art, e.g. Current Protocols in Molecular Biology, Ausubel et al. (ed.), 2003, John Wiley & Sons, Inc., and can be used in step (2). Multiple same or different steps (2) can be performed, either sequentially, or simultaneously.

[0426] Optionally, a further step (3) is present in addition to step (2). Step (3) relates to a chemical modification as described herein. Typically, chemical modification is introduced into a nucleic acid molecule by incorporating a chemically modified building block at the stage of synthesizing (in vivo or in vitro) the respective nucleic acid molecule. Step (3) may be characterized as follows:

[0427] (3) Modifying the nucleic acid molecule by (i) substituting at least one building block of the nucleic acid molecule by at least one different building block, or (ii) adding a further building block to the nucleic acid molecule.

[0428] Preferably, the step of substituting is characterized in that one building block of the nucleic acid molecule is replaced by a different building block, preferably selected from the following:
[0429] (i-a) a sugar building block of the nucleic acid molecule is replaced by a different sugar building block, or
[0430] (i-b) a backbone building block of the nucleic acid molecule is replaced by a different backbone building block, or
[0431] (i-c) a base building block of the nucleic acid molecule is replaced by a different base building block.

[0432] Preferably, the step of adding is characterized in that a further building block is added to the nucleic acid molecule, prefereably selected from the following:
[0433] (ii-a) a lipid building block is added to the nucleic acid molecule, or
[0434] (ii-b) a 5′-cap is added to the nucleic acid molecule.

[0435] In addition to the general principle that chemical modification is typically introduced into a nucleic acid molecule at the stage of synthesizing (in vivo or in vitro) the respective nucleic acid molecule, the 5′-cap according to (ii-b) can also be introduced post-transcriptionally (e.g., after RNA in vitro transcription using viral or eukaryotic capping enzymes).

[0436] All these embodiments of adding and substituting are combinable with each other.

[0437] Any embodiment of substituting a building block or of adding a building block described throughout this specification can be realized in this method step.

[0438] For illustrative purposes, a substitution can consist of substitution by a naturally occurring building block; respective embodiments are realized as G/C modification, as described below, or as codon optimization, as described below. Alternatively, such substitution can consist of the introduction of a chemical modification (sugar modification, backbone modification, base modification, lipid modification, and introduction of a 5′-cap, all as described below. Methods for making such substitutions are well established in the art, e.g. Current Protocols in Molecular Biology, Ausubel et al. (ed.), 2003, John Wiley & Sons, Inc.), and can be used in step (3). Multiple same or different steps (3) can be performed, either sequentially, or simultaneously.

[0439] Optionally, the steps (2) and (3) are performed simultaneously.

[0440] Alternativly, the steps (2) and (3) are performed sequentially. In that case, step (2) is preferably performed first.

[0441] Optionally, step (2) is preceded by the following step (1):

[0442] (1) Designing (in silico) of a protein or polypeptide with desired properties, or of a nucleic acid molecule having desired properties.

[0443] Preferably, the method of designing is carried out as follows:
[0444] (i) designing a nucleic acid molecule having desired properties, or
[0445] (ii) in a a first step: designing a protein or polypeptide having desired properties, and, in a subsequent second step: deducing a nucleic acid sequence that encodes said protein or polypeptide, thereby designing a nucleic acid molecule encoding desired properties.

[0446] The designing of the nucleic acid molecule according to (i) or (ii) is followed by physically preparing the designed nucleic acid molecule, as defined herein. Thereby, an optimized nucleic acid molecule is obtained.

[0447] The step of designing (rational design) is not limited as such and will comprise any considerations deemed suitable by the skilled person performing said step. Optionally, said step can be implemented or aided by a computer program. In any event, the inclusion of step (1) enables the making of nucleic acid molecules having any combination of desired properties, or the indirect making of polypeptides or proteins (e.g. fusion proteins) having any combinations having any combination of desired properties. Any functional property of a nucleic acid molecule or of a polypeptide may be, under some circumstances, a desired property. Functional properties associated with nucleic acid moieties or with polypeptide elements are described throughout the present disclosure. The rational design of step (1) enables the targeted combination of any two or more such functional properties.

[0448] The methods of the invention can also be partially or completely be carried out by a machine or apparatus, based on the guidance provided herein. A respectively suitable apparatus is also comprised by the present invention, in particular, an apparatus suitable for providing an optimized nucleic acid molecule according to the invention.

[0449] As an example, the optimized nucleic acid molecule of the present invention may comprise the following moieties in the following order:

5′-cap-5′-UTR-ORF-3′-UTR-histone stem-loop-poly(A)/(C) sequence;
5′-cap-5′-UTR-ORF-3′-UTR-poly(A)/(C) sequence-histone stem-loop;
5′-cap-5′-UTR-ORF-IRES-ORF-3′-UTR-histone stem-loop-poly(A)/(C) sequence;
5′-cap-5′-UTR-ORF-IRES-ORF-3′-UTR-histone stem-loop-poly(A)/(C) sequence-poly(A)/(C) sequence;
5′-cap-5′-UTR-ORF-IRES-ORF-3′-UTR-poly(A)/(C) sequence-histone stem-loop;
5′-cap-5′-UTR-ORF-IRES-ORF-3′-UTR-poly(A)/(C) sequence-poly(A)/(C) sequence histone stem-loop;
5′-cap-5′-UTR-ORF-3′-UTR-poly(A)/(C) sequence-poly(A)/(C) sequence;
5′-cap-5′-UTR-ORF-3′-UTR-poly(A)/(C) sequence-poly(A)/(C) sequence-histone stem loop; etc.

[0450] In the above, “ORF” stands for one or more open reading frames, each comprised of one or more coding moieties, as described herein. Typically, at least one moiety of said ORF encodes a polypeptide or protein of interest (also referred to as coding sequence or cds).

[0451] In some embodiments, the optimized nucleic acid molecule comprises further moieties such as a 5′-cap, a poly(C) sequence and/or an IRES-motif. A 5′-cap may be added, during transcription or post-transcriptionally, to the 5′end of an RNA. Furthermore, the nucleic acid molecule of the invention, particularly if the nucleic acid is in the form of an mRNA or codes for an mRNA, may be modified by a sequence of at least 10 cytidines, preferably at least 20 cytidines, more preferably at least 30 cytidines (so-called “poly(C) sequence”). In particular, the nucleic acid molecule of the invention may contain, especially if the nucleic acid is in the form of an (m)RNA or codes for an mRNA, a poly(C) sequence of typically about 10 to 200 cytidine nucleotides, preferably about 10 to 100 cytidine nucleotides, more preferably about 10 to 70 cytidine nucleotides or even more preferably about 20 to 50 or even 20 to 30 cytidine nucleotides. Most preferably, the nucleic acid molecule of the invention comprises a poly(C) sequence of 30 cytidine residues. Thus, preferably the nucleic acid molecule according to the present invention comprises, preferably in 5′-to-3′ direction, at least one 5′-UTR moiety as described above, an ORF, at least one 3′-UTR moiety as described above, a poly(A) sequence or a polyadenylation signal, and a poly(C) sequence or, in 5′-to-3′ direction, optionally a further 5′-UTR, an ORF, at least one 3′-UTR moiety as described above, a poly(A) sequence or a polyadenylation signal, and a poly(C) sequence, or, in 5′-to-3′ direction, at least one 5′-UTR moiety as described above, an ORF, optionally a further 3′-UTR, a poly(A) sequence or a polyadenylation signal, and a poly(C) sequence.

[0452] 6. Use of the Optimized Nucleic Acid

[0453] The present invention also provides an optimized nucleic acid molecule obtainable by a method for generating an optimized nucleic acid molecule according to the present invention as described herein.

[0454] The nucleic acid of the present invention is useful e.g. in the context of a vector, of a cell, of a pharmaceutical composition and of medical methods and uses, as described herein below:

[0455] 6.1 Vector

[0456] In one aspect, the present invention provides a vector comprising the optimized nucleic acid sequence as described herein. In particular, the preferred embodiments described above for an optimized nucleic acid molecule according to the present invention also apply for an optimized nucleic acid molecule according to the present invention, which is comprised by a vector according to the present invention. For example, in the inventive vector the at least one 3′-UTR moiety and/or the at least one 5′-UTR moiety and the ORF are as described above for the optimized nucleic acid molecule according to the present invention, including the preferred embodiments.

[0457] The vector suitably comprises a cloning site. The cloning site may be any sequence that is suitable for introducing an open reading frame or a sequence comprising an open reading frame, such as one or more restriction sites. Thus, the vector comprising a cloning site is preferably suitable for inserting an open reading frame into the vector, preferably for inserting an open reading frame 3′ to the 5′-UTR moiety and/or 5′ to the 3′-UTR moiety. Preferably the cloning site or the ORF is located 3′ to the 5′-UTR moiety and/or 5′ to the 3′-UTR moiety, preferably in close proximity to the 3′-end of the 5′-UTR moiety and/or to the 5′-end of the 3′-UTR moiety. For example, the cloning site or the ORF may be directly connected to the 3′-end of the 5′-UTR moiety and/or to the 5′-end of the 3′-UTR moiety or they may be connected via a stretch of nucleotides, such as by a stretch of 2, 4, 6, 8, 10, 20 etc. nucleotides as described above for the optimized nucleic acid molecule according to the present invention.

[0458] In a particularly preferred embodiment, the vector according to the present invention is suitable for producing the optimized nucleic acid molecule according to the present invention, preferably for producing an RNA, particularly an mRNA according to the present invention, for example, by optionally inserting an open reading frame or a sequence comprising an open reading frame into the vector and transcribing the vector. Thus, preferably, the vector comprises moieties needed for transcription, such as a promoter, e.g. an RNA polymerase promoter. Preferably, the vector is suitable for transcription using eukaryotic, prokaryotic, viral or phage transcription systems, such as eukaryotic cells, prokaryotic cells, or eukaryotic, prokaryotic, viral or phage in vitro transcription systems. Thus, for example, the vector may comprise a promoter sequence, which is recognized by a polymerase, such as by an RNA polymerase, e.g. by a eukaryotic, prokaryotic, viral, or phage RNA polymerase. In a preferred embodiment, the vector comprises a phage RNA polymerase promoter such as an SP6, T3 or T7, preferably a T7 promoter. Preferably, the vector is suitable for in vitro transcription using a phageenzyme based in vitro transcription system, such as a T7 RNA polymerase based in vitro transcription system.

[0459] In another preferred embodiment, the vector may be used directly for expression of the encoded peptide or protein in cells or tissue. For this purpose, the vector comprises particular moieties, which are necessary for expression in those cells/tissue e.g. particular promoter sequences, such as a CMV promoter.

[0460] The vector may further comprise a poly(A) sequence and/or a polyadenylation signal as described above for the optimized nucleic acid molecule according to the present invention.

[0461] The vector may be an RNA vector or a DNA vector. Preferably, the vector is a DNA vector. The vector may be any vector known to the skilled person, such as a viral vector or a plasmid vector. Preferably, the vector is a plasmid vector, preferably a DNA plasmid vector. Preferably, an RNA vector according to the present invention comprises a sequence selected from the group consisting of the sequences according to RNA sequences corresponding to DNA sequences described above in relation to the DNA vector according to the present invention.

[0462] Preferably, the vector is a circular molecule. Preferably, the vector is a double-stranded molecule, such as a double-stranded DNA molecule. Such circular, preferably double stranded DNA molecule may be used conveniently as a storage form for the inventive optimized nucleic acid molecule. Furthermore, it may be used for transfection of cells, for example, cultured cells. Also it may be used for in vitrotranscription for obtaining an artificial RNA molecule according to the invention.

[0463] Preferably, the vector, preferably the circular vector, is linearizable, for example, by restriction enzyme digestion. In a preferred embodiment, the vector comprises a cleavage site, such as a restriction site, preferably a unique cleavage site, located immediately 3′ to the ORF, or—if present—located immediately 3′ to the 3′-UTR moiety, or—if present—located 3′ to the poly(A) sequence or polyadenylation signal, or—if present—located 3′ to the poly(C) sequence, or—if present—located 3′ to the histone stem-loop. Thus, preferably, the product obtained by linearizing the vector terminates at the 3′end with the 3′-end of the ORF, or—if present—with the 3′-end of the 3′-UTR moiety, or—if present—with the 3′-end of the poly(A) sequence or polyadenylation signal, or—if present—with the 3′-end of the poly(C) sequence. In the embodiment, wherein the vector according to the present invention comprises the optimized nucleic acid molecule according to the present invention, a restriction site, preferably a unique restriction site, is preferably located immediately 3′ to the 3′-end of the optimized nucleic acid molecule.

[0464] 6.2 Cell

[0465] In a further aspect, the present invention relates to a cell comprising the optimized nucleic acid molecule according to the present invention or the vector according to the present invention. The cell may be any cell, such as a bacterial cell, insect cell, plant cell, vertebrate cell, e.g. a mammalian cell. Such cell may be, e.g., used for replication of the vector of the present invention, for example, in a bacterial cell. Furthermore, the cell may be used for transcribing the optimized nucleic acid molecule or the vector according to the present invention and/or translating the open reading frame of the optimized nucleic acid molecule or the vector according to the present invention. For example, the cell may be used for recombinant protein production.

[0466] The cells according to the present invention are, for example, obtainable by standard nucleic acid transfer methods, such as standard transfection, transduction or transformation methods. For example, the optimized nucleic acid molecule or the vector according to the present invention may be transferred into the cell by electroporation, lipofection, e.g. based on cationic lipids and/or liposomes, calcium phosphate precipitation, nanoparticle based transfection, virus based transfection, or based on cationic polymers, such as DEAE-dextran or polyethylenimine etc.

[0467] Preferably, the cell is a mammalian cell, such as a cell of human subject, a domestic animal, a laboratory animal, such as a mouse or rat cell. Cells include in particular cell lines, primary cells, cells in tissue or subjects. In specific embodiments cell types allowing cell culture may be suitable for the present invention. The cell may be a cell of an established cell line, such as a CHO, BHK, 293T, COS-7, HeLa, HEPG2 and HEK, etc. or the cell may be a primary cell, such as a human dermal fibroblast (HDF) cell etc., preferably a cell isolated from an organism. In a preferred embodiment, the cell is an isolated cell of a mammalian subject, preferably of a human subject. For example, the cell may be an immune cell, such as a dendritic cell, a cancer or tumor cell, or any somatic cell etc., preferably of a mammalian subject, preferably of a human subject.

[0468] 6.3 Pharmaceutical Composition

[0469] In a further aspect, the present invention provides a pharmaceutical composition comprising the optimized nucleic acid molecule according to the present invention, the vector according the present invention, or the cell according to the present invention. The pharmaceutical composition according to the invention may be used, e.g., as a vaccine, for example, for genetic vaccination. Thus, the ORF may, e.g., encode an antigen to be administered to a patient for vaccination. Thus, in a preferred embodiment, the pharmaceutical composition according to the present invention is a vaccine. Furthermore, the pharmaceutical composition according to the present invention may be used, e.g., for gene therapy.

[0470] Preferably, the pharmaceutical composition further comprises one or more pharmaceutically acceptable vehicles, diluents and/or excipients and/or one or more adjuvants. In the context of the present invention, a pharmaceutically acceptable vehicle typically includes a liquid or non-liquid basis for the inventive pharmaceutical composition. In one embodiment, the pharmaceutical composition is provided in liquid form. In this context, preferably, the vehicle is based on water, such as pyrogen-free water, isotonic saline or buffered (aqueous) solutions, e.g phosphate, citrate etc. buffered solutions. The buffer may be hypertonic, isotonic or hypotonic with reference to the specific reference medium, i.e. the buffer may have a higher, identical or lower salt content with reference to the specific reference medium, wherein preferably such concentrations of the afore mentioned salts may be used, which do not lead to damage of mammalian cells due to osmosis or other concentration effects. Reference media are e.g. liquids occurring in “in vivo” methods, such as blood, lymph, cytosolic liquids, or other body liquids, or e.g. liquids, which may be used as reference media in “in vitro” methods, such as common buffers or liquids. Such common buffers or liquids are known to a skilled person. Ringer-Lactate solution is particularly preferred as a liquid basis.

[0471] One or more compatible solid or liquid fillers or diluents or encapsulating compounds suitable for administration to a patient may be used as well for the inventive pharmaceutical composition. The term “compatible” as used herein preferably means that these components of the inventive pharmaceutical composition are capable of being mixed with the inventive optimized nucleic acid, vector or cells as defined herein in such a manner that no interaction occurs which would substantially reduce the pharmaceutical effectiveness of the inventive pharmaceutical composition under typical use conditions.

[0472] The pharmaceutical composition according to the present invention may optionally further comprise one or more additional pharmaceutically active components. A pharmaceutically active component in this context is a compound that exhibits a therapeutic effect to heal, ameliorate or prevent a particular indication or disease. Such compounds include, without implying any limitation, peptides or proteins, nucleic acids, (therapeutically active) low molecular weight organic or inorganic compounds (molecular weight less than 5000, preferably less than 1000), sugars, antigens or antibodies, therapeutic agents already known in the prior art, antigenic cells, antigenic cellular fragments, cellular fractions, cell wall components (e.g. polysaccharides), modified, attenuated or de-activated (e.g. chemically or by irradiation) pathogens (virus, bacteria etc.).

[0473] Furthermore, the pharmaceutical composition according to the invention may comprise a carrier for the optimized nucleic acid molecule or the vector. Such a carrier may be suitable for mediating dissolution in physiological acceptable liquids, transport and cellular uptake of the pharmaceutical active optimized nucleic acid molecule or the vector. Accordingly, such a carrier may be a component which may be suitable for depot and delivery of an optimized nucleic acid molecule or vector according to the invention. Such components may be, for example, cationic or polycationic carriers or compounds which may serve as transfection or complexation agent.

[0474] Particularly preferred transfection or complexation agents in this context are cationic or polycationic compounds, including protamine, nucleoline, spermine or spermidine, or other cationic peptides or proteins, such as poly-L-lysine (PLL), poly-arginine, basic polypeptides, cell penetrating peptides (CPPs), including HIV-binding peptides, HIV-1 Tat (HIV), Tat-derived peptides, Penetratin, VP22 derived or analog peptides, HSV VP22 (Herpes simplex), MAP, KALA or protein transduction domains (PTDs), PpT620, proline-rich peptides, arginine-rich peptides, lysine-rich peptides, MPG-peptide(s), Pep-1, L-oligomers, Calcitonin peptide(s), Antennapedia-derived peptides (particularly from Drosophila antennapedia), pAntp, plsI, FGF, Lactoferrin, Transportan, Buforin-2, Bac715-24, SynB, SynB(1), pVEC, hCT-derived peptides, SAP, or histones.

[0475] Further preferred cationic or polycationic compounds may include cationic polysaccharides, for example chitosan, polybrene, cationic polymers, e.g. polyethyleneimine (PEI), cationic lipids, e.g. DOTMA: N[1-(2,3-sioleyloxy)propyl)]-N,N,N-trimethylammonium chloride, DMRIE, di-C14-amidine, DOTIM, SAINT, DC-Chol, BGTC, CTAP, DOPC, DODAP, DOPE: Dioleyl phosphatidylethanol-amine, DOSPA, DODAB, DOIC, DMEPC, DOGS: Dioctadecylamidoglicylspermin, DIMRI: Dimyristo-oxypropyl dimethyl hydroxyethyl ammonium bromide, DOTAP: dioleoyloxy-3-(trimethylammonio)propane, DC-6-14: O,O-ditetradecanoyl-N-(-trimethylammonioacetyl)diethanolamine chloride, CLIP1: rac-[(2,3-dioctadecyloxypropyl)(2-hydroxyethyl)]-dimethylammonium chloride, CLIP6: rac-[2(2,3-di hexadecyloxypropyl-oxymethyloxy)ethyl]-trimethylammonium, CLIP9: rac-[2(2,3-di hexadecyloxypropyl-oxysuccinyloxy)ethyl]-trimethylammonium, oligofectamine, or cationic or polycationic polymers, e.g. modified polyaminoacids, such as alpha-aminoacid-polymers or reversed polyamides, etc., modified polyethylenes, such as PVP (poly(N-ethyl-4-vinylpyridinium bromide)), etc., modified acrylates, such as pDMAEMA (poly(dimethylaminoethyl methylacrylate)), etc., modified Amidoamines such as pAMAM (poly(amidoamine)), etc., modified polybetaaminoester (PBAE), such as diamine end modified 1,4 butanediol diacrylate-co-5-amino-1-pentanol polymers, etc., dendrimers, such as polypropylamine dendrimers or pAMAM based dendrimers, etc., polyimine(s), such as PEI: poly(ethyleneimine), poly(propyleneimine), etc., polyallylamine, sugar backbone based polymers, such as cyclodextrin based polymers, dextran based polymers, Chitosan, etc., silan backbone based polymers, such as PMOXA-PDMS copolymers, etc., Blockpolymers consisting of a combination of one or more cationic blocks (e.g. selected of a cationic polymer as mentioned above) and of one or more hydrophilic- or hydrophobic blocks (e.g polyethyleneglycole); etc.

[0476] Additionally, preferred cationic or polycationic proteins or peptides, which can be used as an adjuvant by complexing the optimized nucleic acid molecule or the vector, preferably an RNA, of the composition, may be selected from following proteins or peptides having the following total formula (VII): (Arg)ₗ;(Lys)ₘ;(His)ₙ;(Orn)ₒ;(Xaa)ₓ, wherein l+m+n+o+x=8-15, and l, m, n or o independently of each other may be any number selected from 0, 1, 2, 3, 4, 5, 6, 7, 8, 9, 10, 11, 12, 13, 14 or 15, provided that the overall content of Arg, Lys, His and Orn represents at least 50% of all amino acids of the oligopeptide; and Xaa may be any amino acid selected from native (=naturally occurring) or non-native amino acids except of Arg, Lys, His or Orn; and x may be any number selected from 0, 1, 2, 3 or 4, provided, that the overall content of Xaa does not exceed 50% of all amino acids of the oligopeptide. Particularly preferred oligoarginines in this context are e.g. Arg7, Arg8, Arg9, Arg7, H3R9, R9H3, H3R9H3, YSSR9SSY, (RKH)4, Y(RKH)2R, etc.

[0477] Furthermore, such cationic or polycationic compounds or carriers may be cationic or polycationic peptides or proteins, which preferably comprise or are additionally modified to comprise at least one —SH moiety. Preferably, a cationic or polycationic carrier is selected from cationic peptides having the following sum formula (VII):

{(Arg)ₗ;(Lys)ₘ;(His)ₙ;(Orn)ₒ;(Xaa)ₓ}; formula (VII)

wherein l+m+n+o+x=3-100, and l, m, n or o independently of each other is any number selected from 0, 1, 2, 3, 4, 5, 6, 7, 8, 9, 10, 11, 12, 13, 14, 15, 16, 17, 18, 19, 20, 21-30, 31-40, 41-50, 51-60, 61-70, 71-80, 81-90 and 91-100 provided that the overall content of Arg (Arginine), Lys (Lysine), His (Histidine) and Orn (Ornithine) represents at least 10% of all amino acids of the oligopeptide; and Xaa is any amino acid selected from native (=naturally occurring) or non-native amino acids except of Arg, Lys, His or Orn; and x is any number selected from 0, 1, 2, 3, 4, 5, 6, 7, 8, 9, 10, 11, 12, 13, 14, 15, 16, 17, 18, 19, 20, 21-30, 31-40, 41-50, 51-60, 61-70, 71-80, 81-90, provided, that the overall content of Xaa does not exceed 90% of all amino acids of the oligopeptide. Any of amino acids Arg, Lys, His, Orn and Xaa may be positioned at any place of the peptide. In this context cationic peptides or proteins in the range of 7-30 amino acids are particular preferred.

[0478] Further, the cationic or polycationic peptide or protein, when defined according to formula {(Arg)ₗ;(Lys)ₘ;(His)ₙ;(Orn)ₒ;(Xaa)ₓ} (formula (VII)) as shown above and which comprise or are additionally modified to comprise at least one —SH moeity, may be, without being restricted thereto, selected from subformula (Vila):

{(Arg)ₗ;(Lys)ₘ;(His)ₙ;(Orn)ₒ;(Xaa′)ₓ(Cys)_{y}} subformula (VIIa)

wherein (Arg)ₗ;(Lys)ₘ;(His)ₙ;(Orn)ₒ; and x are as defined herein, Xaa′ is any amino acid selected from native (=naturally occurring) or non-native amino acids except of Arg, Lys, His, Orn or Cys and y is any number selected from 0, 1, 2, 3, 4, 5, 6, 7, 8, 9, 10, 11, 12, 13, 14, 15, 16, 17, 18, 19, 20, 21-30, 31-40, 41-50, 51-60, 61-70, 71-80 and 81-90, provided that the overall content of Arg (Arginine), Lys (Lysine), His (Histidine) and Orn (Ornithine) represents at least 10% of all amino acids of the oligopeptide. Further, the cationic or polycationic peptide may be selected from subformula (VIIb):

Cys₁{(Arg)ₗ;(Lys)ₘ;(His)ₙ;(Orn)ₒ;(Xaa)ₓ}Cys₂ subformula (VIIb)

wherein empirical formula {(Arg)ₗ;(Lys)ₘ;(His)ₙ;(Orn)ₒ;(Xaa)ₓ} (formula (VIII)) is as defined herein and forms a core of an amino acid sequence according to (semiempirical) formula (VIII) and wherein Cys₁ and Cys₂ are Cysteines proximal to, or terminal to (Arg)ₗ;(Lys)ₘ;(His)ₙ;(Orn)ₒ;(Xaa)ₓ.

[0479] Disulfide-linked polyethyleneglycol/peptide conjugates for the transfection of nucleic acids are disclosed in WO2011/026641. Such conjugates are also encompassed by the present invention. Thus, the polypeptide or protein element of the present invention may be selected to allow preparation of a disulfide-linked polyethyleneglycol/peptide conjugate. In a particular embodiment, the polymeric carrier which may be used to complex the optimized nucleic acid molecule or the vector may be selected from a polymeric carrier molecule according to generic formula (IV):

L-P1-S—[S—P2-S]n-S—P3-L formula (IV),

wherein
[0480] P1 and P3 are different or identical to each other and represent a linear or branched hydrophilic polymer chain, each P1 and P3 exhibiting at least one —SH group, capable to form a disulfide linkage upon condensation with component P2, or alternatively with (AA), (AA)x, or [(AA)x]z if such components are used as a linker between P1 and P2 or P3 and P2) and/or with further components (e.g. (AA), (AA)ₓ, [(AA)x]z or L), the linear or branched hydrophilic polymer chain selected independent from each other from polyethylene glycol (PEG), poly-N-(2-hydroxypropyl)methacrylamide, poly-2-(methacryloyloxy)ethyl phosphorylcholines, poly(hydroxyalkyl L-asparagine), poly(2-(methacryloyloxy)ethyl phosphorylcholine), hydroxyethylstarch or poly(hydroxyalkyl L-glutamine), wherein the hydrophilic polymer chain exhibits a molecular weight of about 1 kDa to about 100 kDa, preferably of about 2 kDa to about 25 kDa; or more preferably of about 2 kDa to about 10 kDa, e.g. about 5 kDa to about 25 kDa or 5 kDa to about 10 kDa;
[0481] P2 is a cationic or polycationic peptide or protein, e.g. as defined above for the polymeric carrier formed by disulfide-crosslinked cationic components, and preferably having a length of about 3 to about 100 amino acids, more preferably having a length of about 3 to about 50 amino acids, even more preferably having a length of about 3 to about 25 amino acids, e.g. a length of about 3 to 10, 5 to 15, 10 to 20 or 15 to 25 amino acids, more preferably a length of about 5 to about 20 and even more preferably a length of about 10 to about 20; or is a cationic or polycationic polymer, e.g. as defined above for the polymeric carrier formed by disulfide-crosslinked cationic components, typically having a molecular weight of about 0.5 kDa to about 30 kDa, including a molecular weight of about 1 kDa to about 20 kDa, even more preferably of about 1.5 kDa to about 10 kDa, or having a molecular weight of about 0.5 kDa to about 100 kDa, including a molecular weight of about 10 kDa to about 50 kDa, even more preferably of about 10 kDa to about 30 kDa; each P2 exhibiting at least two —SH-moieties, capable to form a disulfide linkage upon condensation with further components P2 or component(s) P1 and/or P3 or alternatively with further components (e.g. (AA), (AA)x, or [(AA)x]z);
[0482] —S—S— is a (reversible) disulfide bond (the brackets are omitted for better readability), wherein S preferably represents sulphur or a —SH carrying moiety, which has formed a (reversible) disulfide bond. The (reversible) disulfide bond is preferably formed by condensation of —SH-moieties of either components P1 and P2, P2 and P2, or P2 and P3, or optionally of further components as defined herein (e.g. L, (AA), (AA)x, [(AA)x]z, etc); The —SH group may be part of the structure of these components or added by a modification as defined below;
[0483] L is an optional ligand, which may be present or not, and may be selected independent from the other from RGD, Transferrin, Folate, a signal peptide or signal sequence, a localization signal or sequence, a nuclear localization signal or sequence (NLS), an antibody, a cell penetrating peptide, (e.g. TAT or KALA), a ligand of a receptor (e.g. cytokines, hormones, growth factors etc), small molecules (e.g. carbohydrates like mannose or galactose or synthetic ligands), small molecule agonists, inhibitors or antagonists of receptors (e.g. RGD peptidomimetic analogues), or any further protein as defined herein, etc.;
[0484] n is an integer, typically selected from a range of about 1 to 50, preferably from a range of about 1, 2 or 3 to 30, more preferably from a range of about 1, 2, 3, 4, or 5 to 25, or a range of about 1, 2, 3, 4, or 5 to 20, or a range of about 1, 2, 3, 4, or 5 to 15, or a range of about 1, 2, 3, 4, or 5 to 10, including e.g. a range of about 4 to 9, 4 to 10, 3 to 20, 4 to 20, 5 to 20, or 10 to 20, or a range of about 3 to 15.4 to 15.5 to 15, or 10 to 15, or a range of about 6 to 11 or 7 to 10. Most preferably, n is in a range of about 1, 2, 3, 4, or 5 to 10, more preferably in a range of about 1, 2, 3, or 4 to 9, in a range of about 1, 2, 3, or 4 to 8, or in a range of about 1, 2, or 3 to 7.

[0485] In this context the disclosure of WO 2011/026641 is incorporated herewith by reference. Each of hydrophilic polymers P1 and P3 typically exhibits at least one —SH group, wherein the at least one —SH group is capable to form a disulfide linkage upon reaction with component P2 or with component (AA) or (AA)ₓ, if used as linker between P1 and P2 or P3 and P2 as defined below and optionally with a further component, e.g. L and/or (AA) or (AA)x, e.g. if two or more —SH-moieties are contained. The following sub-formulae “P1-S—S—P2” and “P2-S—S—P3” within generic formula (IV) above (the brackets are omitted for better readability), wherein any of S, P1 and P3 are as defined herein, typically represent a situation, wherein one-SH group of hydrophilic polymers P1 and P3 was condensed with one —SH group of component P2 of generic formula (IV) above, wherein both sulphurs of these —SH groups form a disulfide bond —S—S— as defined herein in formula (IV). These —SH groups are typically provided by each of the hydrophilic polymers P1 and P3, e.g. via an internal cysteine or any further (modified) amino acid or compound which carries a —SH moiety. Accordingly, the sub-formulae “P1-S—S—P2” and “P2-S—S—P3” may also be written as “P1-Cys-Cys-P2” and “P2-Cys-Cys-P3”, if the —SH— moiety is provided by a cysteine, wherein the term Cys-Cys represents two cysteines coupled via a disulfide bond, not via a peptide bond. In this case, the term “—S—S—” in these formulae may also be written as “—S-Cys”, as “-Cys-S” or as “-Cys-Cys-”. In this context, the term “-Cys-Cys-” does not represent a peptide bond but a linkage of two cysteines via their —SH groups to form a disulfide bond. Accordingly, the term “-Cys-Cys-” also may be understood generally as “-(Cys-S)—(S-Cys)-”, wherein in this specific case S indicates the sulphur of the —SH group of cysteine. Likewise, the terms “—S-Cys” and “—Cys-S” indicate a disulfide bond between a —SH containing moiety and a cysteine, which may also be written as “—S—(S-Cys)” and “-(Cys-S)—S”. Alternatively, the hydrophilic polymers P1 and P3 may be modified with a —SH moiety, preferably via a chemical reaction with a compound carrying a —SH moiety, such that each of the hydrophilic polymers P1 and P3 carries at least one such —SH moiety. Such a compound carrying a —SH moiety may be e.g. an (additional) cysteine or any further (modified) amino acid, which carries a —SH moiety. Such a compound may also be any non-amino compound or moiety, which contains or allows to introduce a —SH moiety into hydrophilic polymers P1 and P3 as defined herein. Such non-amino compounds may be attached to the hydrophilic polymers P1 and P3 of formula (IV) of the polymeric carrier via chemical reactions or binding of compounds, e.g. by binding of a 3-thio propionic acid or thioimolane, by amide formation (e.g. carboxylic acids, sulphonic acids, amines, etc), by Michael addition (e.g maleinimide moieties, α, β unsatured carbonyls, etc), by click chemistry (e.g. azides or alkines), by alkene/alkine methatesis (e.g. alkenes or alkines), inline or hydrozone formation (aldehydes or ketons, hydrazins, hydroxylamins, amines), complexation reactions (avidin, biotin, protein G) or components which allow Sn-type substitution reactions (e.g halogenalkans, thiols, alcohols, amines, hydrazines, hydrazides, sulphonic acid esters, oxyphosphonium salts) or other chemical moieties which can be utilized in the attachment of further components. A particularly preferred PEG derivate in this context is alpha-Methoxy-omega-mercapto poly(ethylene glycol). In each case, the SH group, e.g. of a cysteine or of any further (modified) amino acid or compound, may be present at the terminal ends or internally at any position of hydrophilic polymers P1 and P3. As defined herein, each of hydrophilic polymers P1 and P3 typically exhibits at least one —SH-group preferably at one terminal end, but may also contain two or even more —SH groups, which may be used to additionally attach further components as defined herein, preferably further functional peptides or proteins e.g. a ligand, an amino acid component (AA) or (AA)x, antibodies, cell penetrating peptides or enhancer peptides (e.g. TAT, KALA), etc.

[0486] The polymeric carrier molecule can additionally contain an amino acid component (AA)ₓ, wherein x is an integer selected from a range of about 1 to 100. The amino acid component (AA)ₓ can comprise an aromatic amino acid component, a hydrophilic amino acid component, a lipophilic amino acid component, a weak basic amino acid component, a signal peptide, localization signal or sequence, a nuclear localization signal or sequence, a cell penetrating peptide, a therapeutically active protein or peptide, an antigen or an antigenic epitope, a tumour antigen, a pathogenic antigen (an animal antigen, a viral antigen, a protozoal antigen, a bacterial antigen, an allergic antigen), an autoimmune antigen, or a further antigen, an allergen, an antibody, an immunostimulatory protein or peptide, an antigen-specific T-cell receptor, or another protein or peptide suitable for a specific (therapeutic) application. The amino acid component (AA)ₓ can occur as a mixed repetitive amino acid component [(AA)ₓ]_{z}, wherein z is an integer selected from a range of about 1 to 30. Above formula (IV) can be modified according to formula (IVa)

L-P¹—S—{[S—P²—S]ₐ[S-(AA)ₓ-S]_{b}}—S—P³-L,

wherein x, z, S, L, AA, P¹, P² and P³ are as defined before and

a+b=n, wherein
[0487] n is as defined before, preferably in a range of about 1, 2, 3, 4, or 5 to 10;
[0488] a is an integer, selected independent from integer b from a range of about 1 to 50, preferably in a range of about 1, 2, 3, 4, or 5 to 10, and
[0489] b is an integer, selected independent from integer a from a range of about 1 to 50, preferably in a range of about 1, 2, 3, 4, or 5 to 10,
   and wherein the single components [S—P²—S] and [S-(AA)ₓ-S] occur in any order in the subformula {[S—P²—S]ₐ[S-(AA)ₓ-S]_{b}}.

[0490] Component P² can be a cationic or polycationic peptide selected from protamine, nucleoline, spermine or spermidine, poly-L-lysine (PLL), basic polypeptides, poly-arginine, cell penetrating peptides (CPPs), chimeric CPPs, Transportan, or MPG peptides, HIV-binding peptides, Tat, HIV-1 Tat (HIV), Tat-derived peptides, oligoarginines, members of the penetratin family, Penetratin, Antennapedia-derived peptides (particularly from Drosophila antennapedia), pAntp, plsI, etc., antimicrobial-derived CPPs, Buforin-2, Bac715-24, SynB, SynB(1), pVEC, hCT-derived peptides, SAP, MAP, KALA, PpTG20, Proline-rich peptides, Loligomere, Arginine-rich peptides, Calcitonin-peptides, FGF, Lactoferrin, histones, VP22 derived or analog peptides, HSV, VP22 (Herpes simplex), MAP, KALA or protein transduction domains (PTDs, PpT620, prolin-rich peptides, lysine-rich peptides, Pep-1, L-oligomers, Calcitonin peptide(s). The —SH group of component(s) P² can be provided by a cysteine.

[0491] Such polymeric carrier molecules can be incorporated in a polymeric carrier cargo complex, wherein the polymeric carrier cargo is formed of said polymeric carrier molecule and a nucleic acid. Said nucleic acid can be provided in a molar ratio of about 5 to 10000 of polymeric carrier molecule:nucleic acid.

[0492] The polymeric cargo complexes enable expression of a therapeutically active protein or peptide, an antigen, including tumor antigens, pathogenic antigens, animal antigens, viral antigens, protozoal antigens, bacterial antigens, allergic antigens, autoimmune antigens, allergens, antibodies, immunostimulatory proteins or peptides, or antigen-specific T-cell receptors.

[0493] The polymeric carrier molecule can be prepared by a method comprising following steps:
[0494] a) providing at least one cationic or polycationic protein or peptide as component P² as defined herein and/or at least one cationic or polycationic polymer as component P² as defined according to one of claims 1 to 8, and optionally at least one further component (AA)ₓ, mixing these components, preferably in a basic milieu, preferably in the presence of oxygen or a further starter which leads to mild oxidation conditions, and thereby condensing and thus polymerizing these components with each other via disulfide bonds in a polymerization condensation or polycondensation to obtain a repetitive component H—[S—P²—S]ₙ—H or H{[S—P²—S]ₐ[S-(AA)ₓ-S]_{b}}H;
[0495] b) providing a hydrophilic polymer P¹ and/or P³ as defined according to any of claims 1 to 8, optionally modified with a ligand L and/or an amino acid component (AA)ₓ as defined according to any of claims 1 to 8;
[0496] c) mixing the hydrophilic polymer P¹ and/or P³ according to step b) with the repetitive component H—[S—P²—S]ₙ—H or H{[S—P²—S]ₐ[S-(AA)ₓ-S]_{b}}H obtained according to step a) in a ratio of about 2:1, and thereby typically terminating the polymerization condensation or polycondensation reaction and obtaining the inventive polmeric carrier molecule according to formula (IV) or (IVa);
[0497] d) optionally purifying the polymeric carrier molecule obtained according to step c);
[0498] e) optionally adding a nucleic acid as defined herein to the polymeric carrier obtained according to step c) or d) and complexing the nucleic acid with the polymeric carrier obtained according to step c) or d) to obtain a polymeric carrier cargo complex as defined according to any of claims 9 to 12.

[0499] The polymeric carrier molecules and methods of WO2011/026641 are incorporated herein by reference.

[0500] Further preferred cationic or polycationic compounds, which can be used as transfection or complexation agent may include cationic polysaccharides, for example chitosan, polybrene, cationic polymers, e.g. polyethyleneimine (PEI), cationic lipids, e.g. DOTMA: [1-(2,3-sioleyloxy)propyl)]-N,N,N-trimethylammonium chloride, DMRIE, di-C14-amidine, DOTIM, SAINT, DC-Chol, BGTC, CTAP, DOPC, DODAP, DOPE: Dioleyl phosphatidylethanol-amine, DOSPA, DODAB, DOIC, DMEPC, DOGS: Dioctadecylamidoglicylspermin, DIMRI: Dimyristo-oxypropyl dimethyl hydroxyethyl ammonium bromide, DOTAP: dioleoyloxy-3-(trimethylammonio)propane, DC-6-14: O,O-ditetradecanoyl-N-(α-trimethylammonioacetyl)diethanolamine chloride, CLIP1: rac-[(2,3-dioctadecyloxypropyl)(2-hydroxyethyl)]-dimethylammonium chloride, CLIP6: rac-[2(2,3-di hexadecyloxypropyl-oxymethyloxy)ethyl]-trimethylammonium, CLIP9: rac-[2(2,3-dihexadecyloxypropyl-oxysuccinyloxy)ethyl]-trimethylammonium, oligofectamine, or cationic or polycationic polymers, e.g. modified polyaminoacids, such as β-aminoacid-polymers or reversed polyamides, etc., modified polyethylenes, such as PVP (poly(N-ethyl-4-vinylpyridinium bromide)), etc., modified acrylates, such as pDMAEMA (poly(dimethylaminoethyl methylacrylate)), etc., modified Amidoamines such as pAMAM (poly(amidoamine)), etc., modified polybetaaminoester (PBAE), such as diamine end modified 1,4 butanediol diacrylate-co-5-amino-1-pentanol polymers, etc., dendrimers, such as polypropylamine dendrimers or pAMAM based dendrimers, etc., polyimine(s), such as PEI: poly(ethyleneimine), poly(propyleneimine), etc., polyallylamine, sugar backbone based polymers, such as cyclodextrin based polymers, dextran based polymers, chitosan, etc., silan backbone based polymers, such as PMOXA-PDMS copolymers, etc., blockpolymers consisting of a combination of one or more cationic blocks (e.g. selected from a cationic polymer as mentioned above) and of one or more hydrophilic or hydrophobic blocks (e.g polyethyleneglycole); etc.

[0501] According to another embodiment, the pharmaceutical composition according to the invention may comprise an adjuvant in order to enhance the immunostimulatory properties of the pharmaceutical composition. In this context, an adjuvant may be understood as any compound, which is suitable to support administration and delivery of the components such as the optimized nucleic acid molecule or vector comprised in the pharmaceutical composition according to the invention. Furthermore, such an adjuvant may, without being bound thereto, initiate or increase an immune response of the innate immune system, i.e. a non-specific immune response. With other words, when administered, the pharmaceutical composition according to the invention typically initiates an adaptive immune response directed to the antigen encoded by the optimized nucleic acid molecule. Additionally, the pharmaceutical composition according to the invention may generate an (supportive) innate immune response due to addition of an adjuvant as defined herein to the pharmaceutical composition according to the invention.

[0502] Such an adjuvant may be selected from any adjuvant known to a skilled person and suitable for the present case, i.e. supporting the induction of an immune response in a mammal. Preferably, the adjuvant may be selected from the group consisting of, without being limited thereto, TDM, MDP, muramyl dipeptide, pluronics, alum solution, aluminium hydroxide, ADJUMER™ (polyphosphazene); aluminium phosphate gel; glucans from algae; algammulin; aluminium hydroxide gel (alum); highly protein-adsorbing aluminium hydroxide gel; low viscosity aluminium hydroxide gel; AF or SPT (emulsion of squalane (5%), Tween 80 (0.2%), Pluronic L121 (1.25%), phosphate-buffered saline, pH 7.4); AVRIDINE™ (propanediamine); BAY R1005™ ((N-(2-deoxy-2-L-leucylamino-b-D-glucopyranosyl)-N-octadecyl-dodecanoyl-amide hydroacetate); CALCITRIOL™ (1-alpha,25-dihydroxy-vitamin D3); calcium phosphate gel; CAP™ (calcium phosphate nanoparticles); cholera holotoxin, cholera-toxin-A1-protein-A-D-fragment fusion protein, sub-unit B of the cholera toxin; CRL 1005 (block copolymer P1205); cytokine-containing liposomes; DDA (dimethyldioctadecylammonium bromide); DHEA (dehydroepiandrosterone); DMPC (dimyristoylphosphatidylcholine); DMPG (dimyristoylphosphatidylglycerol); DOC/alum complex (deoxycholic acid sodium salt); Freund's complete adjuvant; Freund's incomplete adjuvant; gamma inulin; Gerbu adjuvant (mixture of: i)N-acetylglucosaminyl-(P1-4)-N-acetylmuramyl-L-alanyl-D-glutamine (GMDP), ii) dimethyldioctadecylammonium chloride (DDA), iii) zinc-L-proline salt complex (ZnPro-8); GM-CSF); GMDP (N-acetylglucosaminyl-(b1-4)-N-acetylmuramyl-L-alanyl-D-isoglutamine); imiquimod (1-(2-methypropyl)-1H-imidazo[4,5-c]quinolne-4-amine); ImmTher™ (N-acetylglucosaminyl-N-acetylmuramyl-L-Ala-D-isoGlu-L-Ala-glycerol dipalmitate); DRVs (immunoliposomes prepared from dehydration-rehydration vesicles); interferon-gamma; interleukin-1beta; interleukin-2; interleukin-7; interleukin-12; ISCOMS™; ISCOPREP 7.0.3.™; liposomes; LOXORIBINE™ (7-allyl-8-oxoguanosine); LT oral adjuvant (E. coli labile enterotoxin-protoxin); microspheres and microparticles of any composition; MF59™; (squalene-water emulsion); MONTANIDE ISA 51™ (purified incomplete Freund's adjuvant); MONTANIDE ISA 720™ (metabolisable oil adjuvant); MPL™ (3-Q-desacyl-4′-monophosphoryl lipid A); MTP-PE and MTP-PE liposomes ((N-acetyl-L-alanyl-D-isoglutaminyl-L-alanine-2-(1,2-dipalmitoyl-sn-glycero-3-(hydroxyphosphoryloxy))-ethylamide, monosodium salt); MURAMETIDE™ (Nac-Mur-L-Ala-D-Gln-OCH3); MURAPALMITINE™ and D-MURAPALMITINE™ (Nac-Mur-L-Thr-D-isoGln-sn-glyceroldipalmitoyl); NAGO (neuraminidase-galactose oxidase); nanospheres or nanoparticles of any composition; NISVs (non-ionic surfactant vesicles); PLEURAN™ (β-glucan); PLGA, PGA and PLA (homo- and co-polymers of lactic acid and glycolic acid; microspheres/nanospheres); PLURONIC L121™; PMMA (polymethyl methacrylate); PODDS™ (proteinoid microspheres); polyethylene carbamate derivatives; poly-rA: poly-rU (polyadenylic acid-polyuridylic acid complex); polysorbate 80 (Tween 80); protein cochleates (Avanti Polar Lipids, Inc., Alabaster, Ala.); STIMULON™ (QS-21); Quil-A (Quil-A saponin); S-28463 (4-amino-otec-dimethyl-2-ethoxymethyl-1H-imidazo[4,5 c]quinoline-1-ethanol); SAF-1™ (“Syntex adjuvant formulation”); Sendai proteoliposomes and Sendai-containing lipid matrices; Span-85 (sorbitan trioleate); Specol (emulsion of Marcol 52, Span 85 and Tween 85); squalene or Robane® (2,6,10,15,19,23-hexamethyltetracosan and 2,6,10,15,19,23-hexamethyl-2,6,10,14,18,22-tetracosahexane); stearyltyrosine (octadecyltyrosine hydrochloride); Theramid® (N-acetylglucosaminyl-N-acetylmuramyl-L-Ala-D-isoGlu-L-Ala-dipalmitoxypropylamide); Theronyl-MDP (Termurtide™ or [thr 1]-MDP; N-acetylmuramyl-L-threonyl-D-isoglutamine); Ty particles (Ty-VLPs or virus-like particles); Walter-Reed liposomes (liposomes containing lipid A adsorbed on aluminium hydroxide), and lipopeptides, including Pam3Cys, in particular aluminium salts, such as Adju-phos, Alhydrogel, Rehydragel; emulsions, including CFA, SAF, IFA, MF59, Provax, TiterMax, Montanide, Vaxfectin; copolymers, including Optivax (CRL1005), L121, Poloaxmer4010), etc.; liposomes, including Stealth, cochleates, including BIORAL; plant derived adjuvants, including QS21, Quil A, Iscomatrix, ISCOM; adjuvants suitable for costimulation including Tomatine, biopolymers, including PLG, PMM, Inulin; microbe derived adjuvants, including Romurtide, DETOX, MPL, CWS, Mannose, CpG nucleic acid sequences, CpG7909, ligands of human TLR 1-10, ligands of murine TLR 1-13, ISS-1018, IC31, Imidazoquinolines, Ampligen, Ribi529, IMOxine, IRIVs, VLPs, cholera toxin, heat-labile toxin, Pam3Cys, Flagellin, GPI anchor, LNFPIII/Lewis X, antimicrobial peptides, UC-1V150, RSV fusion protein, cdiGMP; and adjuvants suitable as antagonists including CGRP neuropeptide.

[0503] Suitable adjuvants may also be selected from cationic or polycationic compounds wherein the adjuvant is preferably prepared upon complexing the optimized nucleic acid molecule or the vector of the pharmaceutical composition with the cationic or polycationic compound. Association or complexing the optimized nucleic acid molecule or the vector of the pharmaceutical composition with cationic or polycationic compounds as defined herein preferably provides adjuvant properties and confers a stabilizing effect to the optimized nucleic acid molecule or the vector of the pharmaceutical composition.

[0504] The ratio of nucleic acid (the optimized nucleic acid or vector comprising the same) to cationic or polycationic compound may be calculated on the basis of the nitrogen/phosphate ratio (N/P-ratio) of the entire nucleic acid complex. For example, 1 μg RNA typically contains about 3 nmol phosphate residues, provided the RNA exhibits a statistical distribution of bases. Additionally, 1 μg peptide typically contains about x nmol nitrogen residues, dependent on the molecular weight and the number of basic amino acids. When exemplarily calculated for (Arg)9 (molecular weight 1424 g/mol, 9 nitrogen atoms), 1 μg (Arg)9 contains about 700 pmol (Arg)9 and thus 700×9=6300 pmol basic amino acids=6.3 nmol nitrogen atoms. For a mass ratio of about 1:1 RNA/(Arg)9 an N/P ratio of about 2 can be calculated. When exemplarily calculated for protamine (molecular weight about 4250 g/mol, 21 nitrogen atoms, when protamine from salmon is used) with a mass ratio of about 2:1 with 2 μg RNA, 6 nmol phosphate are to be calculated for the RNA; 1 μg protamine contains about 235 pmol protamine molecules and thus 235×21=4935 pmol basic nitrogen atoms=4.9 nmol nitrogen atoms. For a mass ratio of about 2:1 RNA/protamine an N/P ratio of about 0.81 can be calculated. For a mass ratio of about 8:1 RNA/protamine an N/P ratio of about 0.2 can be calculated. In the context of the present invention, an N/P-ratio is preferably in the range of about 0.1-10, preferably in a range of about 0.3-4 and most preferably in a range of about 0.5-2 or 0.7-2 regarding the ratio of nucleic acid:peptide in the complex, and most preferably in the range of about 0.7-1.5.

[0505] Patent application WO2010/037539, the disclosure of which is incorporated herein by reference, describes an immunostimulatory composition and methods for the preparation of an immunostimulatory composition. Accordingly, in a preferred embodiment of the invention, the composition is obtained in two separate steps in order to obtain both, an efficient immunostimulatory effect and efficient translation of the optimized nucleic acid molecule according to the invention. Therein, a so called “adjuvant component” is prepared by complexing—in a first step—the optimized nucleic acid molecule or vector, preferably an RNA, of the adjuvant component with a cationic or polycationic compound in a specific ratio to form a stable complex. In this context, it is important, that no free cationic or polycationic compound or only a neglibly small amount remains in the adjuvant component after complexing the nucleic acid. Accordingly, the ratio of the nucleic acid and the cationic or polycationic compound in the adjuvant component is typically selected in a range that the nucleic acid is entirely complexed and no free cationic or polycationic compound or only a small amount remains in the composition. Preferably the ratio of the adjuvant component, i.e. the ratio of the nucleic acid to the cationic or polycationic compound is selected from a range of about 6:1 (w/w) to about 0.25:1 (w/w), more preferably from about 5:1 (w/w) to about 0.5:1 (w/w), even more preferably of about 4:1 (w/w) to about 1:1 (w/w) or of about 3:1 (w/w) to about 1:1 (w/w), and most preferably a ratio of about 3:1 (w/w) to about 2:1 (w/w).

[0506] According to a preferred embodiment, the optimized nucleic acid molecule or vector, preferably an RNA molecule, according to the invention is added in a second step to the complexed nucleic acid molecule, preferably an RNA, of the adjuvant component in order to form the (immunostimulatory) composition of the invention. Therein, the artificial acid molecule or vector, preferably an RNA, of the invention is added as free nucleic acid, i.e.

[0507] nucleic acid, which is not complexed by other compounds. Prior to addition, the free optimized nucleic acid molecule or vector is not complexed and will preferably not undergo any detectable or significant complexation reaction upon the addition of the adjuvant component.

[0508] Suitable adjuvants may furthermore be selected from nucleic acids having the formula (V): GₗXₘGₙ, wherein: G is guanosine (guanine), uridine (uracil) or an analogue of guanosine (guanine) or uridine (uracil); X is guanosine (guanine), uridine (uracil), adenosine (adenine), thymidine (thymine), cytidine (cytosine) or an analogue of the above-mentioned nucleotides (nucleosides); l is an integer from 1 to 40, wherein when l=1 G is guanosine (guanine) or an analogue thereof, when l>1 at least 50% of the nucleotides (nucleosides) are guanosine (guanine) or an analogue thereof; m is an integer and is at least 3; wherein when m=3 X is uridine (uracil) or an analogue thereof, when m>3 at least 3 successive uridines (uracils) or analogues of uridine (uracil) occur; n is an integer from 1 to 40, wherein when n=1 G is guanosine (guanine) or an analogue thereof, when n>1 at least 50% of the nucleotides (nucleosides) are guanosine (guanine) or an analogue thereof.

[0509] Other suitable adjuvants may furthermore be selected from nucleic acids having the formula (VI): CₗXₘCₙ, wherein: C is cytidine (cytosine), uridine (uracil) or an analogue of cytidine (cytosine) or uridine (uracil); X is guanosine (guanine), uridine (uracil), adenosine (adenine), thymidine (thymine), cytidine (cytosine) or an analogue of the above-mentioned nucleotides (nucleosides); l is an integer from 1 to 40, wherein when l=1 C is cytidine (cytosine) or an analogue thereof, when l>1 at least 50% of the nucleotides (nucleosides) are cytidine (cytosine) or an analogue thereof; m is an integer and is at least 3; wherein when m=3 X is uridine (uracil) or an analogue thereof, when m>3 at least 3 successive uridines (uracils) or analogues of uridine (uracil) occur; n is an integer from 1 to 40, wherein when n=1 C is cytidine (cytosine) or an analogue thereof, when n>1 at least 50% of the nucleotides (nucleosides) are cytidine (cytosine) or an analogue thereof.

[0510] The pharmaceutical composition according to the present invention preferably comprises a “safe and effective amount” of the components of the pharmaceutical composition, particularly of the inventive optimized nucleic acid molecule, the vector and/or the cells as defined herein. As used herein, a “safe and effective amount” means an amount sufficient to significantly induce a positive modification of a disease or disorder as defined herein. At the same time, however, a “safe and effective amount” preferably avoids serious side-effects and permits a sensible relationship between advantage and risk. The determination of these limits typically lies within the scope of sensible medical judgment.

[0511] The compounds and ingredients of the pharmaceutical composition of the invention may also be manufactured and traded separately of each other. Thus, the invention relates further to a kit or kit of parts comprising an optimized nucleic acid molecule according to the invention, a vector according to the invention, a cell according to the invention, and/or a pharmaceutical composition according to the invention. Preferably, such kit or kits of parts may, additionally, comprise instructions for use, cells for transfection, an adjuvant, a means for administration of the pharmaceutical composition, a pharmaceutically acceptable carrier and/or a pharmaceutically acceptable solution for dissolution or dilution of the optimized nucleic acid molecule, the vector, the cells or the pharmaceutical composition.

[0512] 6.4 Suitability of the Present Invention for In Vivo Applications

[0513] The optimized nucleic acid molecules of the present invention are suitable for in vivo administration to humans and animals, particularly in medical methods. Gene therapy and genetic vaccination belong to the most promising and quickly developing medical methods of our modern times. They may provide highly specific and individual options for therapy of a large variety of diseases. Particularly, inherited genetic diseases, infectious diseases, neoplasms (e.g. cancer or tumour diseases), autoimmune diseases, inflammatory diseases, diseases of the blood and blood-forming organs, endocrine, nutritional and metabolic diseases, diseases of the nervous system, diseases of the circulatory system, diseases of the respiratory system, diseases of the digestive system, diseases of the skin and subcutaneous tissue, diseases of the musculoskeletal system and connective tissue, and diseases of the genitourinary system, independently if they are inherited or acquired, may be the subject of such treatment approaches. Also, it is envisaged to prevent early onset of such diseases by these approaches.

[0514] 6.5 Medical Uses

[0515] In a further aspect, the present invention provides the optimized nucleic acid molecule according to the present invention, the vector according to the present invention, the cell according to the present invention, or the pharmaceutical composition according to the present invention for use as a medicament, for example, as vaccine (in genetic vaccination) or in gene therapy.

[0516] The use can comprise the administration of the optimized nucleic acid molecule according to the present invention, the vector according to the present invention, the cell according to the present invention, or the pharmaceutical composition according to the present invention to a patient in need thereof.

[0517] The optimized nucleic acid molecule according to the present invention, the vector according to the present invention, the cell according to the present invention, or the pharmaceutical composition according to the present invention are particularly suitable for any medical application which makes use of the therapeutic action or effect of peptides, polypeptides or proteins, or where supplementation of a particular peptide or protein is needed or beneficial. Thus, the present invention provides the optimized nucleic acid molecule according to the present invention, the vector according to the present invention, the cell according to the present invention, or the pharmaceutical composition according to the present invention for use in the treatment or prevention of diseases or disorders amenable to treatment by the therapeutic action or effect of peptides, polypeptides or proteins or amenable to treatment by supplementation of a particular peptide, polypeptide or protein. For example, the optimized nucleic acid molecule according to the present invention, the vector according to the present invention, the cell according to the present invention, or the pharmaceutical composition according to the present invention may be used for the treatment or prevention of genetic diseases, autoimmune diseases, cancerous or tumour-related diseases, infectious diseases, chronic diseases or the like, e.g., by genetic vaccination or gene therapy.

[0518] In particular, such therapeutic treatments which benefit from an increased and prolonged presence of therapeutic peptides, polypeptides or proteins or from more immunogenic properties of the therapeutic peptides, polypeptides or proteins in a subject to be treated are especially suitable as medical application in the context of the present invention. Thus, a particularly suitable medical application for the optimized nucleic acid molecule according to the present invention, the vector according to the present invention, the cell according to the present invention, or the pharmaceutical composition according to the present invention is vaccination. Thus, the present invention provides the optimized nucleic acid molecule according to the present invention, the vector according to the present invention, the cell according to the present invention, or the pharmaceutical composition according to the present invention for vaccination of a subject, preferably a mammalian subject, more preferably a human subject. Preferred vaccination treatments are vaccination against infectious diseases, such as bacterial, protozoal or viral infections, and anti-tumour-vaccination. Such vaccination treatments may be prophylactic or therapeutic.

[0519] Depending on the disease to be treated or prevented, the protein of interest encoded by the optimized nucleic acid molecule may be selected. For example, the open reading frame may code for a protein that has to be supplied to a patient suffering from total lack or at least partial loss of function of a protein, such as a patient suffering from a genetic disease. Additionally the open reading frame may be chosen from an ORF coding for a peptide or protein which beneficially influences a disease or the condition of a subject. Furthermore, the open reading frame may code for a peptide or protein which effects down-regulation of a pathological overproduction of a natural peptide or protein or elimination of cells expressing pathologically a protein or peptide. Such lack, loss of function or overproduction may, e.g., occur in the context of tumour and neoplasia, autoimmune diseases, allergies, infections, chronic diseases or the like. Furthermore, the open reading frame may code for an antigen or immunogen, e.g. for an epitope of a pathogen or for a tumour antigen. Thus, in preferred embodiments, the optimized nucleic acid molecule or the vector according to the present invention comprises an ORF encoding an amino acid sequence comprising or consisting of an antigen or immunogen, e.g. an epitope of a pathogen or a tumour-associated antigen, a 3′-UTR moiety as described above and/or a 5′-UTR moiety as described above, and optional further components, such as a poly(A) sequence etc.

[0520] In the context of medical application, in particular, in the context of vaccination, it is preferred that the optimized nucleic acid molecule according to the present invention is RNA, preferably mRNA, since DNA harbours the risk of eliciting an anti-DNA immune response and tends to insert into genomic DNA. However, in some embodiments, for example, if a viral delivery vehicle, such as an adenoviral delivery vehicle is used for delivery of the optimized nucleic acid molecule or the vector according to the present invention, e.g., in the context of gene therapeutic treatments, it may be desirable that the optimized nucleic acid molecule or the vector is a DNA molecule.

[0521] 6.5.1 Gene Therapy

[0522] The main conceptual rational behind gene therapy (or molecular therapy) is appropriate modulation of impaired gene expression associated with pathological conditions of specific diseases. Pathologically altered gene expression may result in lack or overproduction of essential gene products, for example, signalling factors such as hormones, housekeeping factors, metabolic enzymes, structural proteins or the like. Altered gene expression may not only be due to mis-regulation of transcription and/or translation, but also due to mutations within the ORF coding for a particular protein. Pathological mutations may be caused by e.g. chromosomal aberration, or by more specific mutations, such as point or frame-shift-mutations, all of them resulting in limited functionality and, potentially, total loss of function of the gene product. However, misregulation of transcription or translation may also occur, if mutations affect genes encoding proteins which are involved in the transcriptional or translational machinery of the cell. Such mutations may lead to pathological up- or down-regulation of genes which are—as such—functional. Genes encoding gene products which exert such regulating functions, may be, e.g., transcription factors, signal receptors, messenger proteins or the like. However, loss of function of such genes encoding regulatory proteins may, under certain circumstances, be reversed by artificial introduction of other factors acting further downstream of the impaired gene product. Such gene defects may also be compensated by gene therapy via substitution of the affected gene itself.

[0523] The main conceptual rational behind gene therapy is appropriate modulation of impaired gene expression associated with pathological conditions of specific diseases. Pathologically altered gene expression may result in lack or overproduction of essential gene products, for example, signalling factors such as hormones, housekeeping factors, metabolic enzymes, structural proteins or the like. Altered gene expression may not only be due to mis-regulation of transcription and/or translation, but also due to mutations within the ORF coding for a particular protein. Pathological mutations may be caused by e.g. chromosomal aberration, or by more specific mutations, such as point or frame-shift-mutations, all of them resulting in limited functionality and, potentially, total loss of function of the gene product. However, misregulation of transcription or translation may also occur, if mutations affect genes encoding proteins which are involved in the transcriptional or translational machinery of the cell. Such mutations may lead to pathological up- or down-regulation of genes which are—as such—functional. Genes encoding gene products which exert such regulating functions, may be, e.g., transcription factors, signal receptors, messenger proteins or the like. However, loss of function of such genes encoding regulatory proteins may, under certain circumstances, be reversed by artificial introduction of other factors acting further downstream of the impaired gene product. Such gene defects may also be compensated by gene therapy via substitution of the affected gene itself.

[0524] Optimized nucleic acid of the present invention can be used as vector for gene therapy.

[0525] In particular, optimized nucleic acid of the present invention can be used to encode any kind of protein suitable for use in molecular therapy. Illustrative examples comprise insulin, EPO and the like.

[0526] 6.5.2 Genetic Vaccination

[0527] Genetic vaccination allows evoking a desired immune response to selected antigens, such as components of bacterial surfaces, viral particles, tumour antigens or the like. Generally, vaccination is one of the pivotal achievements of modern medicine. However, effective vaccines are currently available only for a limited number of diseases. Accordingly, infections that are not preventable by vaccination still affect millions of people every year.

[0528] Commonly, vaccines may be subdivided into “first”, “second” and “third” generation vaccines. “First generation” vaccines are, typically, whole-organism vaccines. They are based on either live and attenuated or killed pathogens, e.g. viruses, bacteria or the like. The major drawback of live and attenuated vaccines is the risk for a reversion to life-threatening variants. Thus, although attenuated, such pathogens may still intrinsically bear unpredictable risks. Killed pathogens may not be as effective as desired for generating a specific immune response. In order to minimize these risks, “second generation” vaccines were developed. These are, typically, subunit vaccines, consisting of defined antigens or recombinant protein components which are derived from pathogens.

[0529] Genetic vaccines, i.e. vaccines for genetic vaccination, are usually understood as “third generation” vaccines. They are typically composed of genetically engineered nucleic acid molecules which allow expression of peptide or protein (antigen) fragments characteristic for a pathogen or a tumor antigen in vivo. Genetic vaccines are expressed upon administration to a patient after uptake by target cells. Expression of the administered nucleic acids results in production of the encoded proteins. In the event these proteins are recognized as foreign by the patient's immune system, an immune response is triggered.

[0530] As can be seen from the above, both methods, gene therapy and genetic vaccination, are essentially based on the administration of nucleic acid molecules to a patient and subsequent transcription and/or translation of the encoded genetic information. Alternatively, genetic vaccination or gene therapy may also comprise methods which include isolation of specific body cells from a patient to be treated, subsequent in ex vivo transfection of such cells, and re-administration of the treated cells to the patient.

[0531] 6.5.3 Route of Administration

[0532] The optimized nucleic acid molecule according to the present invention, the vector according to the present invention, the cell according to the present invention, or the pharmaceutical composition according to the present invention may be administered orally, parenterally, by inhalation spray, topically, rectally, nasally, buccally, vaginally, via an implanted reservoir or via jet injection. The term parenteral as used herein includes subcutaneous, intravenous, intramuscular, intra-articular, intra-synovial, intrasternal, intrathecal, intrahepatic, intralesional, intracranial, transdermal, intradermal, intrapulmonal, intraperitoneal, intracardial, intraarterial, and sublingual injection or infusion techniques. In a preferred embodiment, the optimized nucleic acid molecule according to the present invention, the vector according to the present invention, the cell according to the present invention, or the pharmaceutical composition according to the present invention is administered via needle-free injection (e.g. jet injection).

[0533] Preferably, the optimized nucleic acid molecule according to the present invention, the vector according to the present invention, the cell according to the present invention, or the pharmaceutical composition according to the present invention is administered parenterally, e.g. by parenteral injection, more preferably by subcutaneous, intravenous, intramuscular, intra-articular, intra-synovial, intrasternal, intrathecal, intrahepatic, intralesional, intracranial, transdermal, intradermal, intrapulmonal, intraperitoneal, intracardial, intraarterial, sublingual injection or via infusion techniques. Particularly preferred is intradermal and intramuscular injection. Sterile injectable forms of the inventive pharmaceutical composition may be aqueous or oleaginous suspension. These suspensions may be formulated according to techniques known in the art using suitable dispersing or wetting agents and suspending agents. Preferably, the solutions or suspensions are administered via needle-free injection (e.g. jet injection).

[0534] The optimized nucleic acid molecule according to the present invention, the vector according to the present invention, the cell according to the present invention, or the pharmaceutical composition according to the present invention may also be administered orally in any orally acceptable dosage form including, but not limited to, capsules, tablets, aqueous suspensions or solutions.

[0535] The optimized nucleic acid molecule according to the present invention, the vector according to the present invention, the cell according to the present invention, or the pharmaceutical composition according to the present invention may also be administered topically, especially when the target of treatment includes areas or organs readily accessible by topical application, e.g. including diseases of the skin or of any other accessible epithelial tissue. Suitable topical formulations are readily prepared for each of these areas or organs. For topical applications, the optimized nucleic acid molecule according to the present invention, the vector according to the present invention, the cell according to the present invention, or the pharmaceutical composition according to the present invention may be formulated in a suitable ointment suspended or dissolved in one or more carriers.

[0536] In one embodiment, the use as a medicament comprises the step of transfection of mammalian cells, preferably in vitro or ex vivo transfection of mammalian cells, more preferably in vitro transfection of isolated cells of a subject to be treated by the medicament. If the use comprises the in vitro transfection of isolated cells, the use as a medicament may further comprise the readministration of the transfected cells to the patient. The use of the inventive optimized nucleic acid molecules or the vector as a medicament may further comprise the step of selection of successfully transfected isolated cells. Thus, it may be beneficial if the vector further comprises a selection marker. Also, the use as a medicament may comprise in vitro transfection of isolated cells and purification of an expression-product, i.e. the encoded peptide or protein from these cells. This purified peptide or protein may subsequently be administered to a subject in need thereof.

[0537] The present invention also provides a method for treating or preventing a disease or disorder as described above comprising administering the optimized nucleic acid molecule according to the present invention, the vector according to the present invention, the cell according to the present invention, or the pharmaceutical composition according to the present invention to a subject in need thereof.

[0538] Furthermore, the present invention provides a method for treating or preventing a disease or disorder comprising transfection of a cell with an optimized nucleic acid molecule according to the present invention or with the vector according to the present invention. Said transfection may be performed in vitro, ex vivo or in vivo. In a preferred embodiment, transfection of a cell is performed in vitro and the transfected cell is administered to a subject in need thereof, preferably to a human patient. Preferably, the cell which is to be transfected in vitro is an isolated cell of the subject, preferably of the human patient. Thus, the present invention provides a method of treatment comprising the steps of isolating a cell from a subject, preferably from a human patient, transfecting the isolated cell with the optimized nucleic acid according to the present invention or the vector according to the present invention, and administering the transfected cell to the subject, preferably the human patient.

[0539] The method of treating or preventing a disorder according to the present invention is preferably a vaccination method or a gene therapy method as described above.

[0540] The following Figures, Sequences and Examples are intended to illustrate the invention further. They are not intended to limit the subject matter of the invention thereto.

### BRIEF DESCRIPTION OF THE FIGURES

[0541] FIG. 1: shows a western blot to detect HA proteins in cell lysates (A) and cell culture supernatant (B) using an anti HA (H1N1) protein specific antibody. M: protein marker lane; 1: recombinant HA protein (positive control); 2: HA_{ΔTM}-SGG-ferritin; 3: HA_{ΔTM}; 4: negative control; 5: HA_{ΔTM}-C3d_P28; 6: HA_{ΔTM}-foldon. The size ladder (kDa) of the protein marker is shown on the left of panel (A). See Example 2.

[0542] FIG. 2: shows IgG1 and IgG2a titers of mice immunized with the indicated formulated HA mRNA vaccines. RiLa served as a negative control. Antibody titers were measured at day 21 and day 28. (A) and (B) shows HA-specific IgG1 antibody titers; (C) and (D) shows HA-specific IgG2a antibody titers. The horizontal bar indicates the median. Every data point represents one individual specimen. See Example 4.

[0543] FIG. 3: shows HI titers of mice immunized with the indicated formulated HA mRNA vaccines. RiLa served as a negative control. HI titers were determined at day 28 (1 week after boost immunization). HI titers of >40 are associated with a protection from influenza virus infection (indicated by dashed line). Every data point represents one individual specimen. See Example 5.

[0544] FIG. 4: shows IgG1 and IgG2a titers of mice immunized with the indicated formulated HA mRNA vaccines. RiLa served as a negative control. Antibody titers were measured at day 35 and day 49. (A) and (B) shows HA-specific IgG1 antibody titers; (C) and (D) shows HA-specific IgG2a antibody titers. The horizontal bar indicates the median. Every data point represents one individual specimen. See Example 6.

[0545] FIG. 5: shows HI titers of mice immunized with the indicated formulated HA mRNA vaccines. RiLa served as a negative control. HI titers were determined at day 49 (4 weeks after boost immunization). HI titers of >40 are associated with a protection from influenza virus infection (indicated by dashed line). Every data point represents one individual specimen. See Example 7.

[0546] FIG. 6: shows HI titers of mice immunized with the indicated formulated HA mRNA vaccines. RiLa served as a negative control. HI titers were determined at day 14 (2 weeks after boost immunization (pB)). HI titers of >40 are associated with a protection from influenza virus infection (indicated by dashed line). Every data point represents one individual specimen. See Example 8.

### EXAMPLES

### Example 1: Preparation of mRNA HA Constructs for In Vitro and In Vivo Experiments

[0547] 1.1. Explanation of the HA Constructs:

[0548] For the present example, the target protein was the antigen hemagglutinin of Influenza A virus (A/Netherlands/602/2009(H1N1); GI:228860929). The C-terminal transmembrane domain (TM) of the protein was removed (amino acids 531-566), hereinafter referred to as HA_{ΔTM}. To potentially promote oligomerization, a non-heme ferritin of Helicobacter pylori was fused to the C-terminus of HA_{M}, separated by a “SGG” spacer sequence, hereinafter referred as HA_{ΔTM}-SGG-ferritin. To potentially promote trimerization, a foldon domain of the fibritin/foldon protein of the bacteriophage T4T was fused to the C-terminus of HA_{ΔTM}, hereinafter referred to as HA_{ΔTM}-foldon. As immunologic adjuvant element, C3d_P28 was fused to the C-terminus of HA_{ΔTM}, hereinafter referred to as HA_{ΔTM}-C3d_P28. To potentially promote multimerization, a human IgG1 Fc domain was fused to the C-terminus of HA_{ΔTM}, hereinafter referred to as HA_{ΔTM}-IgG FC. To obtain targeting of dendritic cells, a CD40 ligand domain was fused to a HA_{ΔTM}, additionally comprising a GCN4plI for trimerization, hereinafter referred to as HA_{ΔTM}-GCN4plI-CD40L). The fusion constructs used in the present example as well as the control constructs are listed with their respective SEQ ID NOs in Table 1.

[0549] 1.2. Preparation of DNA and mRNA Constructs

[0550] DNA sequences encoding the target element HA_{ΔTM} fused to respective additional elements were prepared and used for subsequent RNA in vitro transcription reactions. The constructs are listed in Table 1.

TABLE 1
Prepared mRNA HA-fusion constructs

| | Protein SEQ ID | mRNA SEQ ID |
|---|---|---|
| Protein construct description | NO | NO |
| HA_{ΔTM} | 1667 | 1663 |
| HA_{ΔTM}-SGG-ferritin | 1670 | 1666 |
| HA_{ΔTM}-foldon | 1669 | 1665 |
| HA_{ΔTM}-C3d_P28 | 1668 | 1664 |
| HA membrane bound | 1735 | 1732 |
| HA_{ΔTM}-IgG FC | 1736 | 1733 |
| HA_{ΔTM}-GCN4pII-CD40L | 1737 | 1734 |

[0551] The DNA sequences were prepared by modifying the wild type encoding DNA sequences by introducing a GC-optimized sequence for stabilization. Sequences were introduced into a derived pUC19 vector and modified to comprise stabilizing UTR sequences derived from alpha-globin-3′-UTR (muag (mutated alpha-globin-3′-UTR)), a histone-stem-loop structure, and a stretch of 70× adenosine at the 3′-terminal end.

[0552] 1.3. RNA In Vitro Transcription

[0553] The respective DNA plasmids were transcribed in vitro using DNA dependent T7 RNA polymerase in the presence of a CAP analog (m7GpppG) and a nucleotide mixture. Subsequently, the in vitro transcribed mRNA was purified using PureMessenger® (CureVac, Tübingen, Germany; WO2008/077592A1). The obtained mRNA (naked, unformulated mRNA) was used for in vitro expression analysis.

[0554] 1.4. Preparation of Protamine Complexed mRNA Vaccine

[0555] Prior to use in in vivo vaccination experiments, naked mRNA constructs were complexed with protamine. The mRNA complexation consisted of a mixture of 50% naked mRNA and 50% mRNA complexed with protamine at a weight ratio of 2:1. First, mRNA was complexed with protamine by addition of protamine-Ringer's lactate solution to mRNA. After incubation for 10 minutes, when the complexes were stably generated, naked mRNA was added, and the final concentration of the vaccine was adjusted with Ringer's lactate solution. The obtained formulated mRNA vaccine was used for in vivo experiments.

### Example 2: Expression of HA Constructs in HEK 293T Cells and Analysis Using Western Blot

[0556] The aim of these experiments was to analyse the expression of the HA mRNA constructs (see Table 1) and to determine the release of the HA protein into the supernatant of transfected HEK 293T cells. All HA mRNA vaccine candidates contained an endogenous secretory signal peptide (N-terminus of the HA protein) that should promote the release from the producing cells into the supernatant. Cell lysates were also analyzed for HA protein expression.

[0557] 2.1. Transfection of HEK 293T Cells

[0558] HEK 293T cells were seeded in a 24-well plate at a density of 70,000 cells/well in cell culture medium (DMEM complete), 48 h prior to transfection. Cells were transfected with and 5 μg naked, unformulated mRNA HA constructs (see Table 1) using Lipofectamine 2000 (Invitrogen).

[0559] 48 hours post transfection, transfection supernatants were collected. Additionally, cells were harvested and lysed with RIPA lysis buffer (50 mM Tris-HCl pH 7.4, 150 mM NaCl, 1% TritonX-100, 0.1% SDS). The respective supernatants and cell lysates were stored at −20° C.

[0560] 2.2. Analysis for HA Expression Using Western Blot

[0561] An SDS-PAGE was performed with supernatants and whole cell lysates from all samples with Mini-PROTEAN® TGX Precast Mini Gels 7.5% (Bio-Rad). Untransfected cells were used as a negative control. 0.5 μg recombinant H1N1 HA (A/California/04/2009; Sino Biological) was used as a positive control. The blotting on a nitrocellulose membrane was performed for 2 h in the presence of a blotting buffer. After blocking the membrane in a respective buffer, antibody incubation (primary and secondary antibodies) and signal detection (LI-COR measurement) was performed. The presence of HA was analyzed using a commercially available mouse monoclonal anti influenza A virus H1N1 specific antibody (Clone 2C10H2, Sino Biological, C) in combination with a goat anti mouse IgG1 IRDye® 800 coupled secondary antibody (LI-COR Biosciences). The presence of tubulin was analyzed either in cell lysates as a loading control or in supernatants to check for cellular contamination using a rabbit anti α/β tubulin antibody (Cell signaling Technology) in combination with a goat anti rabbit IgG IRDye® 680 coupled secondary antibody (LI-COR Biosciences). The approximate protein sizes (without taking post-translational protein modifications into account) are shown in table 2. Western blot results are shown in FIG. 1.

TABLE 2
Expected protein sizes (approximations) of the HA monomers

| Protein construct description | Protein size monomer [kDa] |
|---|---|
| HA_{ΔTM} | 59.4 |
| HA_{ΔTM}-SGG-ferritin | 80.7 |
| HA_{ΔTM}-foldon | 64.6 |
| HA_{ΔTM}-C3d_P28 | 75 |

[0562] Results:

[0563] For all four tested mRNA constructs, HA protein monomers were detected in cell lysates and/or supernatants (see FIG. 1), showing that mRNA constructs were translated into protein. The band sizes were in accordance to the expected band sizes. The majority of protein for all four mRNA constructs was detected in the respective supernatants (see FIG. 1B). Since no tubulin protein was detectable in the analyzed supernatants (data not shown), the presence of HA protein was considered to be mediated by secretion triggered by the endogenous secretory signal peptide and not via release by cell death associated with the transfection method. Taken together, all tested mRNA constructs were translated and secreted in HEK 293T cells.

### Example 3: Vaccination of Mice with HA Constructs

[0564] Immunization

[0565] Female BALB/c mice were injected intramuscularly (i.m.) with formulated mRNAs vaccines encoding HA protein constructs with doses indicated in Table 3. As a negative control, one group of mice was vaccinated with buffer (ringer lactate, RiLa). All animals received boost injections on day 21. Blood samples were collected on day 21 and 28 for the analysis of the immune response in the effector phase (see Examples 4-5) and additionally on day 35 and 49 for the analysis of the immune response in the memory phase (see Examples 6-7).

TABLE 3
Vaccination regimen for indicated animal groups

| | Number | Injected mRNA HA | | Vaccination |
|---|---|---|---|---|
| Group | of mice | construct | dose | on day |
| 1 | 8 | HA_{ΔTM} | 40 μg | 0/21 |
| 2 | 8 | HA_{ΔTM}-SGG-ferritin | 40 μg | 0/21 |
| 3 | 8 | HA_{ΔTM}-foldon | 40 μg | 0/21 |
| 4 | 8 | HA_{ΔTM}-C3d_P28 | 40 μg | 0/21 |
| 5 | 8 | RiLa buffer | | 0/21 |

### Example 4: ELISA Analysis of an Antigen Specific Humoral Immune Response in the Effector Phase

[0566] The aim of this experiment was to assess the antigen specific humoral immune response in vaccinated mice for the used mRNA vaccines and to compare the detected immune response evoked by HA fusion constructs (with additional element) with the immune response evoked by the target HA antigen without additional element. HA protein specific IgG1 and IgG2a antibodies were detected by ELISA using sera obtained at day 21 and day 28 (effector phase).

[0567] Determination of Anti HA Protein Specific IgG1 and IgG2a Antibodies by ELISA:

[0568] Assessment of an antigen specific immune response was carried out by detecting HA protein specific IgG1 and IgG2 antibodies. MaxiSorp® plates (Nalgene Nunc International) were coated with HA protein (Charles River Laboratories). After blocking with 1×PBS containing 0.05% Tween-20 and 1% BSA the coated plates were incubated with respective mouse serum dilutions. Binding of specific antibodies to the HA antigens was detected using biotinylated isotype specific anti-mouse antibodies followed by streptavidin-HRP (horse radish peroxidase) with ABTS as substrate. For the analysis of an antigen specific immune response in the effector phase, sera obtained at day 21 (three weeks after prime vaccination) and day 28 (one week after boost vaccination) were used. Vaccination was performed according to Example 3. The results are shown in FIG. 2.

[0569] Results:

[0570] Assessment of the humoral immune response after immunizations revealed that 40 μg of the respective mRNA vaccines induced HA specific IgG1 and IgG2a antibody titers for the HA_{ΔTM}-SGG-ferritin and the HA_{ΔTM}-foldon constructs. The HA_{ΔTM} (without additional element) vaccine induced IgG1 antibodies but not IgG2a antibodies at day 28 (FIG. 2B). The HA_{ΔTM}-C3d_P28 vaccine did not induce substantial antibody titers.

[0571] Taken together, the addition of ferritin and foldon elements to HA_{ΔTM} substantially improved the induction of a HA specific humoral immune response in the effector phase, whereas the addition of a C3d_P28 element to HA_{ΔTM} had no positive effect.

### Example 5: Hemagglutination Inhibition Assay to Determine Virus Neutralizing Titers in the Effector Phase

[0572] The aim of this experiment was to determine virus neutralizing titers in the collected mice sera (see Example 3) and to compare virus neutralizing titers of mice vaccinated with HA fusion constructs to the titers of mice vaccinated with the target HA antigen without additional element.

[0573] Hemagglutination Inhibition Assay (HI)

[0574] In a 96-well plate, the obtained sera were mixed with HA H1N1 antigen (A/California/07/2009 (H1N1); NIBSC) and red blood cells (4% erythrocytes; Lohmann Tierzucht). In the presence of HA neutralizing antibodies, an inhibition of hemagglutination of erythrocytes can be observed. The lowest level of titered serum that resulted in a visible inhibition of hemagglutination was the assay result. For the analysis of an antigen specific immune response in the effector phase, sera obtained at day 28 (one week after boost vaccination) were used. Vaccination was performed according to Example 3. The results are shown in FIG. 3.

[0575] Results:

[0576] The results show that potentially protective virus neutralizing titers (>40) were detected for mice vaccinated with the ferritin (2 out of 8 mice) and foldon (3 out of 8 mice) HA fusion constructs, indicating that vaccination with these constructs induced protective neutralizing antibodies in the effector phase. The HA vaccine without additional element and the HA vaccine with a C3d_P28 could not induce virus neutralizing titers.

[0577] Taken together, the addition of ferritin and foldon elements to HA_{ΔTM} substantially increased the protective antibody titers in the effector phase, whereas the addition of a C3d_P28 element to HA_{ΔTM} had no positive effect.

### Example 6: ELISA Analysis of an Antigen Specific Humoral Immune Response in the Memory Phase

[0578] Determination of Anti HA Protein Specific IgG1 and IgG2a Antibodies by ELISA:

[0579] ELISA was performed according to example 4. Vaccination was performed according to example 3. For the analysis of an antigen specific immune response in the memory phase, sera obtained at day 35 (two week after boost vaccination) and day 49 (four weeks after boost vaccination) were used. The results are shown in FIG. 4.

[0580] Results:

[0581] Assessment of the humoral immune response after immunizations revealed that 40 μg of the respective mRNA vaccines induced strong HA specific IgG1 and IgG2a antibody titers for the HA_{ΔTM}-SGG-ferritin and the HA_{ΔTM}-foldon constructs. The HA_{ΔTM} vaccine (without additional element) and also the HA_{ΔTM}-C3d_P28 vaccine only induced IgG1 antibodies in few mice. Taken together, the addition of ferritin and foldon elements to HA_{ΔTM} substantially improved the induction of a HA specific humoral immune response in the memory phase, whereas the addition of a C3d_P28 element to HA_{ΔTM} had no positive effect.

### Example 7: Hemagglutination Inhibition Assay (HI) to Determine Virus Neutralizing Titers in the Memory Phase

[0582] The HI assay was performed according to example 5. Vaccination was performed according to example 3. For the analysis virus neutralizing titers in the memory phase, sera obtained at day 49 (four weeks after boost vaccination) was used. The results are shown in FIG. 5.

[0583] Results:

[0584] The results show that potentially protective virus neutralizing titers (>40) were detected for mice vaccinated with the ferritin (4 out of 8 mice) and foldon (4 out of 8 mice) fusion HA mRNA constructs. As the measurement was performed 4 weeks after boost vaccination, the results suggest that the ferritin and foldon HA fusion constructs were able to induce protective neutralizing titers in the memory phase. Protective HI titers were not detected in HA_{ΔTM}-C3d_P28 and the HA_{ΔTM} vaccinated mice.

[0585] Taken together, the addition of ferritin and foldon elements to HA_{ΔTM} could substantially increase the protective antibody titers in the effector phase, whereas the addition of a C3d_P28 element to HA_{ΔTM} had no positive effect.

### Example 8: Hemagglutination Inhibition Assay to Determine Functional Antibody Titers

[0586] The Hemagglutination inhibition assay (HI) assay was performed according to example 5. Vaccination was performed according to example 3 on day 0 and day 21. For the HI assay, sera obtained 14 days after boost vaccination were used (day 35). In the experiment, mice were vaccinated with HA_{ΔTM}-IgG1 FC and HA_{ΔTM}-GCN4plI-CD40L, both in combination with a membrane-bound HA. As control, mice were vaccinated only with the membrane-bound HA. The vaccination schemes as well as the used concentrations are provided in Table 4. The results are shown in FIG. 6.

TABLE 4
Vaccination regimen for indicated animal groups

| | | | | Vacci- |
|---|---|---|---|---|
| | Number | HA fusion construct | membrane bound HA | nation |
| Group | of mice | (20 μg) | (20 μg) | on day |
| A | 8 | HA_{ΔTM}-IgG FC | Membrane bound HA | 0/21 |
| B | 8 | HA_{ΔTM}-GCN4pII- | Membrane bound HA | 0/21 |
| | | CD40L | | |
| C | 8 | — | Membrane bound HA | 0/21 |

| | | | |
|---|---|---|---|
| D | 8 | RiLa buffer control | 0/21 |

[0587] Results:

[0588] The results show that potentially protective antibody titers (>40) were detected for mice vaccinated with the HA TM-IgG1 FC (6 out of 8 mice) and HA TM-GCN4plI-CD40L (5 out of 8 mice) fusion mRNA constructs in combination with membrane-bound HA (Groups A and B). Compared with a single treatment with membrane bound HA vaccine (4 out of 8) this led to an increase in protective antibody titers (see FIG. 6).

### Example 9: EPO Half-Life Extension Using EPO Fusion Constructs

[0589] 9.1. Explanation of the EPO Constructs:

[0590] For the present example, the target protein is the mice EPO protein (MmEPO; GI: 21389309; NM_007942.2; Uniprot ID P07321; SEQ ID NO: 1738). To extend the half life of the EPO protein, several elements that extend the half life of the protein are C-terminally fused to the EPO protein. The fusion constructs of the present example as well as the control constructs are listed with their respective SEQ ID NOs (fusion proteins and respective RNA coding sequences) in Table 5.

[0591] 9.2. Preparation of EPO DNA and mRNA Constructs

[0592] The DNA sequences encoding the target EPO (SEQ ID NO: 1771) fused to respective additional half life extension elements are prepared by modifying the wild type encoding DNA sequences by introducing a GC-optimized sequence and/or codon optimized sequence for stabilization and optimized expression. Sequences were introduced into a vector and modified to additionally comprise stabilizing UTR sequences (3′ UTR and 5′ UTR), a histone-stem-loop structure, a poly-A stretch, and a poly-C stretch at the 3′-terminal end.

[0593] The DNA constructs are used as templates for subsequent RNA in vitro transcription reactions (see Example 1). Subsequently, the in vitro transcribed mRNA is purified using PureMessenger® (CureVac, Tübingen, Germany; WO2008/077592A1).

TABLE 5
Prepared EPO-fusion constructs

| | SEQ ID NOs | SEQ ID NOs |
|---|---|---|
| | of EPO-fusion | of RNA coding |
| Protein construct description | proteins | sequences (cds) |
| MmEPO-CgB | 1739 | 1772 |
| MmEPO-Xten | 1740 | 1773 |
| MmEPO-PAS600 | 1741 | 1774 |
| MmEPO-PAS200 | 1742 | 1775 |
| MmEPO-HAP200 | 1743 | 1776 |
| MmEPO-ELP | 1744 | 1777 |
| MmEPO-MmAlb(25-608) | 1745 | 1778 |
| MmEPO-HsAlb(25-609) | 1746 | 1779 |
| MmEPO-HsAlb(25-609_K597P) | 1747 | 1780 |
| MmEPO-linkerG4S-MmAlb(404-608) | 1748 | 1781 |
| MmEPO-ABP-SA21 | 1749 | 1782 |
| MmEPO-SSG148_ABD_SpG_high | 1750 | 1783 |
| MmEPO-HsIgG1 | 1751 | 1784 |
| MmEPO-MmIgG1 | 1752 | 1785 |
| MmEPO-MmIgG2 | 1753 | 1786 |
| MmEPO-MmTf(20-697) | 1754 | 1787 |
| MmEPO-HsTf(20-698) | 1755 | 1788 |
| MmEPO-Sa_SpA (121-270) | 1756 | 1789 |
| MmEPO-Hs_monoIgG1 | 1757 | 1790 |
| MmEPO-Hs_2x-monoIgG1 | 1758 | 1791 |
| MmEPO-IgBD | 1759 | 1792 |
| MmEPO-linkerG4S-IgBP | 1760 | 1793 |
| MmEPO-E-XTEN | 1761 | 1794 |
| MmEPO-ELP(420) | 1762 | 1795 |
| MmEPO-ABP SA15 | 1763 | 1796 |
| MmEPO-ABD SPG | 1764 | 1797 |
| MmEPO-HsAlbDIII (P02768; 404-609) | 1765 | 1798 |
| MmEPO-monomeric Mm Fc | 1766 | 1799 |
| MmEPO-tandem monomeric MmFc | 1767 | 1800 |
| MmEPO-HsIgG2 | 1768 | 1801 |
| MmEPO-MmIgG2b | 1769 | 1802 |
| MmEPO-HsIgG4 | 1770 | 1803 |

[0594] 9.3. Expression of EPO Constructs in HEK 293T Cells and HeLa Cells and Analysis Using Western Blot

[0595] To characterize the expression of EPO mRNA constructs and to determine the release of the EPO protein into the supernatant of transfected HEK 293T cells and transfected HeLa cells, in vitro expression analysis is performed. A detailed description of the experiments is provided below.

[0596] 9.3.1. Transfection of Cells

[0597] HEK 293T cells and HeLa cells are seeded in a 24-well plate at a density of 70,000 cells/well in cell culture medium 48 h prior to transfection. Cells are transfected with 5 μg naked, unformulated mRNA EPO constructs (see Table 4) using Lipofectamine 2000 (Invitrogen). As a control, full length EPO mRNA construct is used (without half-life extending element). 24 hours post transfection, cell culture supernatants are collected. Additionally, cells are harvested and lysed with RIPA lysis buffer (50 mM Tris-HCl pH 7.4, 150 mM NaCl, 1% TritonX-100, 0.1% SDS) or harvested using SDS lysis buffer.

[0598] 9.3.2. Analysis of EPO Expression and Secretion Using Western Blot and EPO-ELISA

[0599] An SDS-PAGE is performed with supernatants and whole cell lysates from all samples with Mini-PROTEAN® TGX Precast Mini Gels 4-20% (Gradient gel; Bio-Rad). Untransfected cells are used as a negative control. The blotting on a nitrocellulose membrane is performed for 2 h in the presence of a blotting buffer. After blocking the membrane in a respective buffer, antibody incubation (primary and secondary antibodies) and signal detection (LI-COR measurement) is performed. The presence of EPO is analyzed using a commercially available anti EPO specific antibody in combination with a suitable IgG1 IRDye® 800 coupled secondary antibody (LI-COR Biosciences). Additionally, EPO levels in the culture medium are quantitatively measured 24 hours post transfection using a commercially available mouse EPO ELISA kit (R&D Systems, Wiesbaden, Germany). The constructs showing suitable expression and secretion characteristics are used in in vivo experiments.

[0600] 9.3. In Vivo Characterization of TransIT Formulated EPO Constructs

[0601] To characterize the half-life of the generated EPO-fusion proteins, mRNA encoding said fusion proteins is formulated for in vivo application using TransIT and injected intraperitoneal or intraveneously into female BALB/c mice in equimolar amounts. As control, EPO protein and TransIT formulated EPO mRNA (without half-life extending element) are used. 6 hours, 1 day, 4 days and 7 days after injection, a few microliters of blood are collected, heparinized, and centrifuged. EPO levels in the supernatant are measured using a mouse EPO ELISA kit (R&D Systems). In addition, reticulocytes are analysed using a commercially available Retic-COUNT kit (BD Biosciences, Heidelberg, Germany) according to the manufacturer's instructions. Stained cells are analyzed on a FACS Canto (BD Biosciences). Reticulocyte levels are given as percentage of total red blood cells.

The application's sequence listing, which the Patent Office published only in electronic form, follows.

SEQUENCE LISTING (1804 sequences)

SEQ ID NO: 1 - protein, 17 aa, Artificial Sequence
  gaussia_luciferase_SSP
MGVKVLFALICIAVAEA

SEQ ID NO: 2 - protein, 19 aa, Artificial Sequence
  human_immunoglobulin_heavy_chain_SSP
MDWTWRVFCLLAVTPGAHP

SEQ ID NO: 3 - protein, 19 aa, Artificial Sequence
  human_immunoglobulin_heavy_chain_SSP
MAWSPLFLTLITHCAGSWA

SEQ ID NO: 4 - protein, 19 aa, Artificial Sequence
  mus_musculus_insulin-like_growth_factor_SSP
MVISVVLLLLAAYAVPAQG

SEQ ID NO: 5 - protein, 20 aa, Artificial Sequence
  gi|10834982|ref|NP_000590.1| insulin-like growth factor-binding protein 5 precursor [Homo sapiens]
MVLLTAVLLLLAAYAGPAQS

SEQ ID NO: 6 - protein, 21 aa, Artificial Sequence
  mus_musculus_laminin_subunit_gamma2like_SSP
MPALWLSCCLGVALLLPAAQA

SEQ ID NO: 7 - protein, 21 aa, Artificial Sequence
  gi|157419138|ref|NP_005553.2| laminin subunit gamma-2 isoform a precursor [Homo sapiens]
MPALWLGCCLCFSLLLPAARA

SEQ ID NO: 8 - protein, 24 aa, Artificial Sequence
  mus_musculus_pregnancy_zone_protein_SSP
MRRNQLPTPAFLLLFLLLPRDATT

SEQ ID NO: 9 - protein, 14 aa, Artificial Sequence
  Homo_sapiens_Q9P246_STIM2_HUMAN
MLVLGLLVAGAADG

SEQ ID NO: 10 - protein, 14 aa, Artificial Sequence
  Homo_sapiens_P14314_GLU2B_HUMAN
MLLPLLLLLPMCWA

SEQ ID NO: 11 - protein, 15 aa, Artificial Sequence
  Homo_sapiens_P41271_NBL1_HUMAN
MLRVLVGAVLPAMLL

SEQ ID NO: 12 - protein, 15 aa, Artificial Sequence
  Homo_sapiens_P04746_AMYP_HUMAN
MKFFLLLFTIGFCWA

SEQ ID NO: 13 - protein, 15 aa, Artificial Sequence
  Homo_sapiens_P15086_CBPB1_HUMAN
MLALLVLVTVALASA

SEQ ID NO: 14 - protein, 15 aa, Artificial Sequence
  Homo_sapiens_P09871_C1S_HUMAN
MWCIVLFSLLAWVYA

SEQ ID NO: 15 - protein, 15 aa, Artificial Sequence
  Homo_sapiens_P07477_TRY1_HUMAN
MNPLLILTFVAAALA

SEQ ID NO: 16 - protein, 15 aa, Artificial Sequence
  Homo_sapiens_Q9BXJ0_C1QT5_HUMAN
MRPLLVLLLLGLAAG

SEQ ID NO: 17 - protein, 15 aa, Artificial Sequence
  Homo_sapiens_P00790_PEPA_HUMAN
MKWLLLLGLVALSEC

SEQ ID NO: 18 - protein, 15 aa, Artificial Sequence
  Homo_sapiens_P47710_CASA1_HUMAN
MRLLILTCLVAVALA

SEQ ID NO: 19 - protein, 15 aa, Artificial Sequence
  Homo_sapiens_P04054_PA21B_HUMAN
MKLLVLAVLLTVAAA

SEQ ID NO: 20 - protein, 15 aa, Artificial Sequence
  Homo_sapiens_P07478_TRY2_HUMAN
MNLLLILTFVAAAVA

SEQ ID NO: 21 - protein, 15 aa, Artificial Sequence
  Homo_sapiens_P15088_CBPA3_HUMAN
MRLILPVGLIATTLA

SEQ ID NO: 22 - protein, 15 aa, Artificial Sequence
  Homo_sapiens_P12314_FCGR1_HUMAN
MWFLTTLLLWVPVDG

SEQ ID NO: 23 - protein, 15 aa, Artificial Sequence
  Homo_sapiens_P05814_CASB_HUMAN
MKVLILACLVALALA

SEQ ID NO: 24 - protein, 16 aa, Artificial Sequence
  Homo_sapiens_Q9Y5C1_ANGL3_HUMAN
MFTIKLLLFIVPLVIS

SEQ ID NO: 25 - protein, 16 aa, Artificial Sequence
  Homo_sapiens_P02774_VTDB_HUMAN
MKRVLVLLLAVAFGHA

SEQ ID NO: 26 - protein, 16 aa, Artificial Sequence
  Homo_sapiens_P16444_DPEP1_HUMAN
MWSGWWLWPLVAVCTA

SEQ ID NO: 27 - protein, 16 aa, Artificial Sequence
  Homo_sapiens_P07359_GP1BA_HUMAN
MPLLLLLLLLPSPLHP

SEQ ID NO: 28 - protein, 16 aa, Artificial Sequence
  Homo_sapiens_P13727_PRG2_HUMAN
MKLPLLLALLFGAVSA

SEQ ID NO: 29 - protein, 16 aa, Artificial Sequence
  Homo_sapiens_P15085_CBPA1_HUMAN
MRGLLVLSVLLGAVFG

SEQ ID NO: 30 - protein, 16 aa, Artificial Sequence
  Homo_sapiens_P06126_CD1A_HUMAN
MLFLLLPLLAVLPGDG

SEQ ID NO: 31 - protein, 16 aa, Artificial Sequence
  Homo_sapiens_P11215_ITAM_HUMAN
MALRVLLLTALTLCHG

SEQ ID NO: 32 - protein, 16 aa, Artificial Sequence
  Homo_sapiens_P08218_ELA2B_HUMAN
MIRTLLLSTLVAGALS

SEQ ID NO: 33 - protein, 16 aa, Artificial Sequence
  Homo_sapiens_P02810_PRPC_HUMAN
MLLILLSVALLAFSSA

SEQ ID NO: 34 - protein, 16 aa, Artificial Sequence
  Homo_sapiens_P21815_SIAL_HUMAN
MKTALILLSILGMACA

SEQ ID NO: 35 - protein, 16 aa, Artificial Sequence
  Homo_sapiens_P14770_GPIX_HUMAN
MPAWGALFLLWATAEA

SEQ ID NO: 36 - protein, 16 aa, Artificial Sequence
  Homo_sapiens_O60844_ZG16_HUMAN
MLTVALLALLCASASG

SEQ ID NO: 37 - protein, 16 aa, Artificial Sequence
  Homo_sapiens_Q8TC27_ADA32_HUMAN
MFRLWLLLAGLCGLLA

SEQ ID NO: 38 - protein, 16 aa, Artificial Sequence
  Homo_sapiens_Q99616_CCL13_HUMAN
MKVSAVLLCLLLMTAA

SEQ ID NO: 39 - protein, 16 aa, Artificial Sequence
  Homo_sapiens_P10163_PRB4_HUMAN
MLLILLSVALLALSSA

SEQ ID NO: 40 - protein, 16 aa, Artificial Sequence
  Homo_sapiens_P07602_SAP_HUMAN
MYALFLLASLLGAALA

SEQ ID NO: 41 - protein, 16 aa, Artificial Sequence
  Homo_sapiens_Q99217_AMELX_HUMAN
MGTWILFACLLGAAFA

SEQ ID NO: 42 - protein, 16 aa, Artificial Sequence
  Homo_sapiens_P14207_FOLR2_HUMAN
MVWKWMPLLLLLVCVA

SEQ ID NO: 43 - protein, 16 aa, Artificial Sequence
  Homo_sapiens_Q6UX27_VSTM1_HUMAN
MTAEFLSLLCLGLCLG

SEQ ID NO: 44 - protein, 16 aa, Artificial Sequence
  Homo_sapiens_Q6UX39_AMTN_HUMAN
MRSTILLFCLLGSTRS

SEQ ID NO: 45 - protein, 16 aa, Artificial Sequence
  Homo_sapiens_P20142_PEPC_HUMAN
MKWMVVVLVCLQLLEA

SEQ ID NO: 46 - protein, 16 aa, Artificial Sequence
  Homo_sapiens_P16233_LIPP_HUMAN
MLPLWTLSLLLGAVAG

SEQ ID NO: 47 - protein, 16 aa, Artificial Sequence
  Homo_sapiens_P16112_PGCA_HUMAN
MTTLLWVFVTLRVITA

SEQ ID NO: 48 - protein, 17 aa, Artificial Sequence
  Homo_sapiens_Q99538_LGMN_HUMAN
MVWKVAVFLSVALGIGA

SEQ ID NO: 49 - protein, 17 aa, Artificial Sequence
  Homo_sapiens_P00736_C1R_HUMAN
MWLLYLLVPALFCRAGG

SEQ ID NO: 50 - protein, 17 aa, Artificial Sequence
  Homo_sapiens_P54762_EPHB1_HUMAN
MALDYLLLLLLASAVAA

SEQ ID NO: 51 - protein, 17 aa, Artificial Sequence
  Homo_sapiens_P14778_IL1R1_HUMAN
MKVLLRLICFIALLISS

SEQ ID NO: 52 - protein, 17 aa, Artificial Sequence
  Homo_sapiens_P10745_RET3_HUMAN
MMREWVLLMSVLLCGLA

SEQ ID NO: 53 - protein, 17 aa, Artificial Sequence
  Homo_sapiens_P27797_CALR_HUMAN
MLLSVPLLLGLLGLAVA

SEQ ID NO: 54 - protein, 17 aa, Artificial Sequence
  Homo_sapiens_P04141_CSF2_HUMAN
MWLQSLLLLGTVACSIS

SEQ ID NO: 55 - protein, 17 aa, Artificial Sequence
  Homo_sapiens_Q14703_MBTP1_HUMAN
MKLVNIWLLLLVVLLCG

SEQ ID NO: 56 - protein, 17 aa, Artificial Sequence
  Homo_sapiens_P09237_MMP7_HUMAN
MRLTVLCAVCLLPGSLA

SEQ ID NO: 57 - protein, 17 aa, Artificial Sequence
  Homo_sapiens_P25311_ZA2G_HUMAN
MVPVLLSLLLLLGPAVP

SEQ ID NO: 58 - protein, 17 aa, Artificial Sequence
  Homo_sapiens_O95813_CER1_HUMAN
MHLLLFQLLVLLPLGKT

SEQ ID NO: 59 - protein, 17 aa, Artificial Sequence
  Homo_sapiens_P55058_PLTP_HUMAN
MALFGALFLALLAGAHA

SEQ ID NO: 60 - protein, 17 aa, Artificial Sequence
  Homo_sapiens_Q9NRM6_I17RB_HUMAN
MSLVLLSLAALCRSAVP

SEQ ID NO: 61 - protein, 17 aa, Artificial Sequence
  Homo_sapiens_P14384_CBPM_HUMAN
MDFPCLWLGLLLPLVAA

SEQ ID NO: 62 - protein, 17 aa, Artificial Sequence
  Homo_sapiens_P15260_INGR1_HUMAN
MALLFLLPLVMQGVSRA

SEQ ID NO: 63 - protein, 17 aa, Artificial Sequence
  Homo_sapiens_P07237_PDIA1_HUMAN
MLRRALLCLAVAALVRA

SEQ ID NO: 64 - protein, 17 aa, Artificial Sequence
  Homo_sapiens_P05186_PPBT_HUMAN
MISPFLVLAIGTCLTNS

SEQ ID NO: 65 - protein, 17 aa, Artificial Sequence
  Homo_sapiens_P52823_STC1_HUMAN
MLQNSAVLLVLVISASA

SEQ ID NO: 66 - protein, 17 aa, Artificial Sequence
  Homo_sapiens_P98066_TSG6_HUMAN
MIILIYLFLLLWEDTQG

SEQ ID NO: 67 - protein, 17 aa, Artificial Sequence
  Homo_sapiens_P04118_COL_HUMAN
MEKILILLLVALSVAYA

SEQ ID NO: 68 - protein, 17 aa, Artificial Sequence
  Homo_sapiens_P11597_CETP_HUMAN
MLAATVLTLALLGNAHA

SEQ ID NO: 69 - protein, 17 aa, Artificial Sequence
  Homo_sapiens_P17050_NAGAB_HUMAN
MLLKTVLLLGHVAQVLM

SEQ ID NO: 70 - protein, 17 aa, Artificial Sequence
  Homo_sapiens_Q6UX41_BTNL8_HUMAN
MALMLSLVLSLLKLGSG

SEQ ID NO: 71 - protein, 17 aa, Artificial Sequence
  Homo_sapiens_P05067_A4_HUMAN
MLPGLALLLLAAWTARA

SEQ ID NO: 72 - protein, 17 aa, Artificial Sequence
  Homo_sapiens_P13674_P4HA1_HUMAN
MIWYILIIGILLPQSLA

SEQ ID NO: 73 - protein, 17 aa, Artificial Sequence
  Homo_sapiens_P09486_SPRC_HUMAN
MRAWIFFLLCLAGRALA

SEQ ID NO: 74 - protein, 17 aa, Artificial Sequence
  Homo_sapiens_O95866_G6B_HUMAN
MAVFLQLLPLLLSRAQG

SEQ ID NO: 75 - protein, 17 aa, Artificial Sequence
  Homo_sapiens_Q9NRC9_OTOR_HUMAN
MARILLLFLPGLVAVCA

SEQ ID NO: 76 - protein, 17 aa, Artificial Sequence
  Homo_sapiens_P20851_C4BPB_HUMAN
MFFWCACCLMVAWRVSA

SEQ ID NO: 77 - protein, 17 aa, Artificial Sequence
  Homo_sapiens_P05305_EDN1_HUMAN
MDYLLMIFSLLFVACQG

SEQ ID NO: 78 - protein, 17 aa, Artificial Sequence
  Homo_sapiens_P07288_KLK3_HUMAN
MWVPVVFLTLSVTWIGA

SEQ ID NO: 79 - protein, 18 aa, Artificial Sequence
  Homo_sapiens_P15289_ARSA_HUMAN
MGAPRSLLLALAAGLAVA

SEQ ID NO: 80 - protein, 18 aa, Artificial Sequence
  Homo_sapiens_P31025_LCN1_HUMAN
MKPLLLAVSLGLIAALQA

SEQ ID NO: 81 - protein, 18 aa, Artificial Sequence
  Homo_sapiens_P28908_TNR8_HUMAN
MRVLLAALGLLFLGALRA

SEQ ID NO: 82 - protein, 18 aa, Artificial Sequence
  Homo_sapiens_P49763_PLGF_HUMAN
MPVMRLFPCFLQLLAGLA

SEQ ID NO: 83 - protein, 18 aa, Artificial Sequence
  Homo_sapiens_Q6UXG3_CLM9_HUMAN
MRLLVLLWGCLLLPGYEA

SEQ ID NO: 84 - protein, 18 aa, Artificial Sequence
  Homo_sapiens_P38570_ITAE_HUMAN
MWLFHTLLCIASLALLAA

SEQ ID NO: 85 - protein, 18 aa, Artificial Sequence
  Homo_sapiens_P05156_CFAI_HUMAN
MKLLHVFLLFLCFHLRFC

SEQ ID NO: 86 - protein, 18 aa, Artificial Sequence
  Homo_sapiens_O75556_SG2A1_HUMAN
MKLLMVLMLAALLLHCYA

SEQ ID NO: 87 - protein, 18 aa, Artificial Sequence
  Homo_sapiens_P07339_CATD_HUMAN
MQPSSLLPLALCLLAAPA

SEQ ID NO: 88 - protein, 18 aa, Artificial Sequence
  Homo_sapiens_P10747_CD28_HUMAN
MLRLLLALNLFPSIQVTG

SEQ ID NO: 89 - protein, 18 aa, Artificial Sequence
  Homo_sapiens_P21128_PP11_HUMAN
MRACISLVLAVLCGLAWA

SEQ ID NO: 90 - protein, 18 aa, Artificial Sequence
  Homo_sapiens_P23141_EST1_HUMAN
MWLRAFILATLSASAAWG

SEQ ID NO: 91 - protein, 18 aa, Artificial Sequence
  Homo_sapiens_P19652_A1AG2_HUMAN
MALSWVLTVLSLLPLLEA

SEQ ID NO: 92 - protein, 18 aa, Artificial Sequence
  Homo_sapiens_P03951_FA11_HUMAN
MIFLYQVVHFILFTSVSG

SEQ ID NO: 93 - protein, 18 aa, Artificial Sequence
  Homo_sapiens_P05111_INHA_HUMAN
MVLHLLLFLLLTPQGGHS

SEQ ID NO: 94 - protein, 18 aa, Artificial Sequence
  Homo_sapiens_P01833_PIGR_HUMAN
MLLFVLTCLLAVFPAIST

SEQ ID NO: 95 - protein, 18 aa, Artificial Sequence
  Homo_sapiens_P43307_SSRA_HUMAN
MRLLPRLLLLLLLVFPAT

SEQ ID NO: 96 - protein, 18 aa, Artificial Sequence
  Homo_sapiens_P07204_TRBM_HUMAN
MLGVLVLGALALAGLGFP

SEQ ID NO: 97 - protein, 18 aa, Artificial Sequence
  Homo_sapiens_P09466_PAEP_HUMAN
MLCLLLTLGVALVCGVPA

SEQ ID NO: 98 - protein, 18 aa, Artificial Sequence
  Homo_sapiens_Q15762_CD226_HUMAN
MDYPTLLLALLHVYRALC

SEQ ID NO: 99 - protein, 18 aa, Artificial Sequence
  Homo_sapiens_P02647_APOA1_HUMAN
MKAAVLTLAVLFLTGSQA

SEQ ID NO: 100 - protein, 18 aa, Artificial Sequence
  Homo_sapiens_P01225_FSHB_HUMAN
MKTLQFFFLFCCWKAICC

SEQ ID NO: 101 - protein, 18 aa, Artificial Sequence
  Homo_sapiens_Q9BX59_TPSNR_HUMAN
MGTQEGWCLLLCLALSGA

SEQ ID NO: 102 - protein, 18 aa, Artificial Sequence
  Homo_sapiens_Q9UBT3_DKK4_HUMAN
MVAAVLLGLSWLCSPLGA

SEQ ID NO: 103 - protein, 18 aa, Artificial Sequence
  Homo_sapiens_P08603_CFAH_HUMAN
MRLLAKIICLMLWAICVA

SEQ ID NO: 104 - protein, 18 aa, Artificial Sequence
  Homo_sapiens_P02768_ALBU_HUMAN
MKWVTFISLLFLFSSAYS

SEQ ID NO: 105 - protein, 18 aa, Artificial Sequence
  Homo_sapiens_P02753_RET4_HUMAN
MKWVWALLLLAALGSGRA

SEQ ID NO: 106 - protein, 18 aa, Artificial Sequence
  Homo_sapiens_P02765_FETUA_HUMAN
MKSLVLLLCLAQLWGCHS

SEQ ID NO: 107 - protein, 18 aa, Artificial Sequence
  Homo_sapiens_P20718_GRAH_HUMAN
MQPFLLLLAFLLTPGAGT

SEQ ID NO: 108 - protein, 18 aa, Artificial Sequence
  Homo_sapiens_P02652_APOA2_HUMAN
MKLLAATVLLLTICSLEG

SEQ ID NO: 109 - protein, 18 aa, Artificial Sequence
  Homo_sapiens_Q08380_LG3BP_HUMAN
MTPPRLFWVWLLVAGTQG

SEQ ID NO: 110 - protein, 18 aa, Artificial Sequence
  Homo_sapiens_Q8WWA0_ITLN1_HUMAN
MNQLSFLLFLIATTRGWS

SEQ ID NO: 111 - protein, 18 aa, Artificial Sequence
  Homo_sapiens_P36980_FHR2_HUMAN
MWLLVSVILISRISSVGG

SEQ ID NO: 112 - protein, 18 aa, Artificial Sequence
  Homo_sapiens_P35542_SAA4_HUMAN
MRLFTGIVFCSLVMGVTS

SEQ ID NO: 113 - protein, 18 aa, Artificial Sequence
  Homo_sapiens_P10144_GRAB_HUMAN
MQPILLLLAFLLLPRADA

SEQ ID NO: 114 - protein, 18 aa, Artificial Sequence
  Homo_sapiens_P22301_IL10_HUMAN
MHSSALLCCLVLLTGVRA

SEQ ID NO: 115 - protein, 18 aa, Artificial Sequence
  Homo_sapiens_Q01638_ILRL1_HUMAN
MGFWILAILTILMYSTAA

SEQ ID NO: 116 - protein, 18 aa, Artificial Sequence
  Homo_sapiens_P10645_CMGA_HUMAN
MRSAAVLALLLCAGQVTA

SEQ ID NO: 117 - protein, 18 aa, Artificial Sequence
  Homo_sapiens_P07996_TSP1_HUMAN
MGLAWGLGVLFLMHVCGT

SEQ ID NO: 118 - protein, 18 aa, Artificial Sequence
  Homo_sapiens_P08311_CATG_HUMAN
MQPLLLLLAFLLPTGAEA

SEQ ID NO: 119 - protein, 18 aa, Artificial Sequence
  Homo_sapiens_P51884_LUM_HUMAN
MSLSAFTLFLALIGGTSG

SEQ ID NO: 120 - protein, 18 aa, Artificial Sequence
  Homo_sapiens_P11021_GRP78_HUMAN
MKLSLVAAMLLLLSAARA

SEQ ID NO: 121 - protein, 18 aa, Artificial Sequence
  Homo_sapiens_P15248_IL9_HUMAN
MLLAMVLTSALLLCSVAG

SEQ ID NO: 122 - protein, 18 aa, Artificial Sequence
  Homo_sapiens_P02771_FETA_HUMAN
MKWVESIFLIFLLNFTES

SEQ ID NO: 123 - protein, 18 aa, Artificial Sequence
  Homo_sapiens_P02735_SAA_HUMAN
MKLLTGLVFCSLVLGVSS

SEQ ID NO: 124 - protein, 18 aa, Artificial Sequence
  Homo_sapiens_P04196_HRG_HUMAN
MKALIAALLLITLQYSCA

SEQ ID NO: 125 - protein, 18 aa, Artificial Sequence
  Homo_sapiens_P17538_CTRB1_HUMAN
MAFLWLLSCWALLGTTFG

SEQ ID NO: 126 - protein, 18 aa, Artificial Sequence
  Homo_sapiens_P61626_LYSC_HUMAN
MKALIVLGLVLLSVTVQG

SEQ ID NO: 127 - protein, 18 aa, Artificial Sequence
  Homo_sapiens_Q02809_PLOD1_HUMAN
MRPLLLLALLGWLLLAEA

SEQ ID NO: 128 - protein, 18 aa, Artificial Sequence
  Homo_sapiens_Q8NBJ9_SIDT2_HUMAN
MFALGLPFLVLLVASVES

SEQ ID NO: 129 - protein, 18 aa, Artificial Sequence
  Homo_sapiens_P02649_APOE_HUMAN
MKVLWAALLVTFLAGCQA

SEQ ID NO: 130 - protein, 18 aa, Artificial Sequence
  Homo_sapiens_Q15848_ADIPO_HUMAN
MLLLGAVLLLLALPGHDQ

SEQ ID NO: 131 - protein, 18 aa, Artificial Sequence
  Homo_sapiens_Q13478_IL18R_HUMAN
MNCRELPLTLWVLISVST

SEQ ID NO: 132 - protein, 18 aa, Artificial Sequence
  Homo_sapiens_P02741_CRP_HUMAN
MEKLLCFLVLTSLSHAFG

SEQ ID NO: 133 - protein, 18 aa, Artificial Sequence
  Homo_sapiens_P20062_TCO2_HUMAN
MRHLGAFLFLLGVLGALT

SEQ ID NO: 134 - protein, 18 aa, Artificial Sequence
  Homo_sapiens_P22748_CAH4_HUMAN
MRMLLALLALSAARPSAS

SEQ ID NO: 135 - protein, 18 aa, Artificial Sequence
  Homo_sapiens_P08294_SODE_HUMAN
MLALLCSCLLLAAGASDA

SEQ ID NO: 136 - protein, 18 aa, Artificial Sequence
  Homo_sapiens_P00738_HPT_HUMAN
MSALGAVIALLLWGQLFA

SEQ ID NO: 137 - protein, 18 aa, Artificial Sequence
  Homo_sapiens_P01042_KNG1_HUMAN
MKLITILFLCSRLLLSLT

SEQ ID NO: 138 - protein, 18 aa, Artificial Sequence
  Homo_sapiens_P20827_EFNA1_HUMAN
MEFLWAPLLGLCCSLAAA

SEQ ID NO: 139 - protein, 19 aa, Artificial Sequence
  Homo_sapiens_Q3V4E3_Q3V4E3_HUMAN
MKSVLLLTTLLVPAHLVAA

SEQ ID NO: 140 - protein, 19 aa, Artificial Sequence
  Homo_sapiens_Q9BQ51_PD1L2_HUMAN
MIFLLLMLSLELQLHQIAA

SEQ ID NO: 141 - protein, 19 aa, Artificial Sequence
  Homo_sapiens_P49908_SEPP1_HUMAN
MWRSLGLALALCLLPSGGT

SEQ ID NO: 142 - protein, 19 aa, Artificial Sequence
  Homo_sapiens_Q9Y279_VSIG4_HUMAN
MGILLGLLLLGHLTVDTYG

SEQ ID NO: 143 - protein, 19 aa, Artificial Sequence
  Homo_sapiens_P58294_PROK1_HUMAN
MRGATRVSIMLLLVTVSDC

SEQ ID NO: 144 - protein, 19 aa, Artificial Sequence
  Homo_sapiens_P06028_GLPB_HUMAN
MYGKIIFVLLLSEIVSISA

SEQ ID NO: 145 - protein, 19 aa, Artificial Sequence
  Homo_sapiens_P02788_TRFL_HUMAN
MKLVFLVLLFLGALGLCLA

SEQ ID NO: 146 - protein, 19 aa, Artificial Sequence
  Homo_sapiens_P23083_HV103_HUMAN
MDWTWRILFLVAAATGAHS

SEQ ID NO: 147 - protein, 19 aa, Artificial Sequence
  Homo_sapiens_P09923_PPBI_HUMAN
MQGPWVLLLLGLRLQLSLG

SEQ ID NO: 148 - protein, 19 aa, Artificial Sequence
  Homo_sapiens_Q9NWM8_FKB14_HUMAN
MRLFLWNAVLTLFVTSLIG

SEQ ID NO: 149 - protein, 19 aa, Artificial Sequence
  Homo_sapiens_P01743_HV102_HUMAN
MDWTWRVFCLLAVAPGAHS

SEQ ID NO: 150 - protein, 19 aa, Artificial Sequence
  Homo_sapiens_Q8TDQ1_CLM1_HUMAN
MPLLTLYLLLFWLSGYSIA

SEQ ID NO: 151 - protein, 19 aa, Artificial Sequence
  Homo_sapiens_P01266_THYG_HUMAN
MALVLEIFTLLASICWVSA

SEQ ID NO: 152 - protein, 19 aa, Artificial Sequence
  Homo_sapiens_P04438_HV208_HUMAN
MDILCSTLLLLTVPSGVLS

SEQ ID NO: 153 - protein, 19 aa, Artificial Sequence
  Homo_sapiens_Q6UW10_SFTPG_HUMAN
MGSGLPLVLLLTLLGSSHG

SEQ ID NO: 154 - protein, 19 aa, Artificial Sequence
  Homo_sapiens_P15421_GLPE_HUMAN
MYGKIIFVLLLSGIVSISA

SEQ ID NO: 155 - protein, 19 aa, Artificial Sequence
  Homo_sapiens_P04216_THY1_HUMAN
MNLAISIALLLTVLQVSRG

SEQ ID NO: 156 - protein, 19 aa, Artificial Sequence
  Homo_sapiens_P26010_ITB7_HUMAN
MVALPMVLVLLLVLSRGES

SEQ ID NO: 157 - protein, 19 aa, Artificial Sequence
  Homo_sapiens_P16150_LEUK_HUMAN
MATLLLLLGVLVVSPDALG

SEQ ID NO: 158 - protein, 19 aa, Artificial Sequence
  Homo_sapiens_Q9BX93_PG12B_HUMAN
MKLASGFLVLWLSLGGGLA

SEQ ID NO: 159 - protein, 19 aa, Artificial Sequence
  Homo_sapiens_P02724_GLPA_HUMAN
MYGKIIFVLLLSAIVSISA

SEQ ID NO: 160 - protein, 19 aa, Artificial Sequence
  Homo_sapiens_P07098_LIPG_HUMAN
MWLLLTMASLISVLGTTHG

SEQ ID NO: 161 - protein, 19 aa, Artificial Sequence
  Homo_sapiens_P12109_CO6A1_HUMAN
MRAARALLPLLLQACWTAA

SEQ ID NO: 162 - protein, 19 aa, Artificial Sequence
  Homo_sapiens_P36955_PEDF_HUMAN
MQALVLLLCIGALLGHSSC

SEQ ID NO: 163 - protein, 19 aa, Artificial Sequence
  Homo_sapiens_P00451_FA8_HUMAN
MQIELSTCFFLCLLRFCFS

SEQ ID NO: 164 - protein, 19 aa, Artificial Sequence
  Homo_sapiens_Q9HBE5_IL21R_HUMAN
MPRGWAAPLLLLLLQGGWG

SEQ ID NO: 165 - protein, 19 aa, Artificial Sequence
  Homo_sapiens_P00709_LALBA_HUMAN
MRFFVPLFLVGILFPAILA

SEQ ID NO: 166 - protein, 19 aa, Artificial Sequence
  Homo_sapiens_P02787_TRFE_HUMAN
MRLAVGALLVCAVLGLCLA

SEQ ID NO: 167 - protein, 19 aa, Artificial Sequence
  Homo_sapiens_P02671_FIBA_HUMAN
MFSMRIVCLVLSVVGTAWT

SEQ ID NO: 168 - protein, 19 aa, Artificial Sequence
  Homo_sapiens_P20702_ITAX_HUMAN
MTRTRAALLLFTALATSLG

SEQ ID NO: 169 - protein, 19 aa, Artificial Sequence
  Homo_sapiens_P02808_STAT_HUMAN
MKFLVFAFILALMVSMIGA

SEQ ID NO: 170 - protein, 19 aa, Artificial Sequence
  Homo_sapiens_P0C0L4_CO4A_HUMAN
MRLLWGLIWASSFFTLSLQ

SEQ ID NO: 171 - protein, 19 aa, Artificial Sequence
  Homo_sapiens_P02749_APOH_HUMAN
MISPVLILFSSFLCHVAIA

SEQ ID NO: 172 - protein, 19 aa, Artificial Sequence
  Homo_sapiens_P05154_IPSP_HUMAN
MQLFLLLCLVLLSPQGASL

SEQ ID NO: 173 - protein, 19 aa, Artificial Sequence
  Homo_sapiens_Q96LA5_FCRL2_HUMAN
MLLWSLLVIFDAVTEQADS

SEQ ID NO: 174 - protein, 19 aa, Artificial Sequence
  Homo_sapiens_P02743_SAMP_HUMAN
MNKPLLWISVLTSLLEAFA

SEQ ID NO: 175 - protein, 19 aa, Artificial Sequence
  Homo_sapiens_P03956_MMP1_HUMAN
MHSFPPLLLLLFWGVVSHS

SEQ ID NO: 176 - protein, 19 aa, Artificial Sequence
  Homo_sapiens_P26842_CD27_HUMAN
MARPHPWWLCVLGTLVGLS

SEQ ID NO: 177 - protein, 19 aa, Artificial Sequence
  Homo_sapiens_P08582_TRFM_HUMAN
MRGPSGALWLLLALRTVLG

SEQ ID NO: 178 - protein, 19 aa, Artificial Sequence
  Homo_sapiens_P02760_AMBP_HUMAN
MRSLGALLLLLSACLAVSA

SEQ ID NO: 179 - protein, 19 aa, Artificial Sequence
  Homo_sapiens_P20916_MAG_HUMAN
MIFLTALPLFWIMISASRG

SEQ ID NO: 180 - protein, 19 aa, Artificial Sequence
  Homo_sapiens_P05546_HEP2_HUMAN
MKHSLNALLIFLIITSAWG

SEQ ID NO: 181 - protein, 19 aa, Artificial Sequence
  Homo_sapiens_P07093_GDN_HUMAN
MNWHLPLFLLASVTLPSIC

SEQ ID NO: 182 - protein, 19 aa, Artificial Sequence
  Homo_sapiens_P15515_HIS1_HUMAN
MKFFVFALVLALMISMISA

SEQ ID NO: 183 - protein, 19 aa, Artificial Sequence
  Homo_sapiens_Q16627_CCL14_HUMAN
MKISVAAIPFFLLITIALG

SEQ ID NO: 184 - protein, 19 aa, Artificial Sequence
  Homo_sapiens_P03952_KLKB1_HUMAN
MILFKQATYFISLFATVSC

SEQ ID NO: 185 - protein, 19 aa, Artificial Sequence
  Homo_sapiens_P81605_DCD_HUMAN
MRFMTLLFLTALAGALVCA

SEQ ID NO: 186 - protein, 19 aa, Artificial Sequence
  Homo_sapiens_Q01151_CD83_HUMAN
MSRGLQLLLLSCAYSLAPA

SEQ ID NO: 187 - protein, 19 aa, Artificial Sequence
  Homo_sapiens_P05113_IL5_HUMAN
MRMLLHLSLLALGAAYVYA

SEQ ID NO: 188 - protein, 19 aa, Artificial Sequence
  Homo_sapiens_P06319_LV605_HUMAN
MAWAPLLLTLLAHCTDCWA

SEQ ID NO: 189 - protein, 19 aa, Artificial Sequence
  Homo_sapiens_P14091_CATE_HUMAN
MKTLLLLLLVLLELGEAQG

SEQ ID NO: 190 - protein, 19 aa, Artificial Sequence
  Homo_sapiens_P04004_VTNC_HUMAN
MAPLRPLLILALLAWVALA

SEQ ID NO: 191 - protein, 19 aa, Artificial Sequence
  Homo_sapiens_P01185_NEU2_HUMAN
MPDTMLPACFLGLLAFSSA

SEQ ID NO: 192 - protein, 19 aa, Artificial Sequence
  Homo_sapiens_P59666_DEF3_HUMAN
MRTLAILAAILLVALQAQA

SEQ ID NO: 193 - protein, 19 aa, Artificial Sequence
  Homo_sapiens_P19801_ABP1_HUMAN
MPALGWAVAAILMLQTAMA

SEQ ID NO: 194 - protein, 19 aa, Artificial Sequence
  Homo_sapiens_P08700_IL3_HUMAN
MSRLPVLLLLQLLVRPGLQ

SEQ ID NO: 195 - protein, 19 aa, Artificial Sequence
  Homo_sapiens_P06331_HV209_HUMAN
MKHLWFLLLWCQLPDVGVL

SEQ ID NO: 196 - protein, 19 aa, Artificial Sequence
  Homo_sapiens_P15516_HIS3_HUMAN
MKFFVFALILALMLSMTGA

SEQ ID NO: 197 - protein, 19 aa, Artificial Sequence
  Homo_sapiens_P06316_LV107_HUMAN
MTCSPLLLTLLIHCTGSWA

SEQ ID NO: 198 - protein, 19 aa, Artificial Sequence
  Homo_sapiens_P01178_NEU1_HUMAN
MAGPSLACCLLGLLALTSA

SEQ ID NO: 199 - protein, 19 aa, Artificial Sequence
  Homo_sapiens_P23946_CMA1_HUMAN
MLLLPLPLLLFLLCSRAEA

SEQ ID NO: 200 - protein, 19 aa, Artificial Sequence
  Homo_sapiens_O43852_CALU_HUMAN
MDLRQFLMCLSLCTAFALS

SEQ ID NO: 201 - protein, 19 aa, Artificial Sequence
  Homo_sapiens_P09848_LPH_HUMAN
MELSWHVVFIALLSFSCWG

SEQ ID NO: 202 - protein, 19 aa, Artificial Sequence
  Homo_sapiens_P08571_CD14_HUMAN
MERASCLLLLLLPLVHVSA

SEQ ID NO: 203 - protein, 19 aa, Artificial Sequence
  Homo_sapiens_P08519_APOA_HUMAN
MEHKEVVLLLLLFLKSAAP

SEQ ID NO: 204 - protein, 19 aa, Artificial Sequence
  Homo_sapiens_P10323_ACRO_HUMAN
MVEMLPTAILLVLAVSVVA

SEQ ID NO: 205 - protein, 19 aa, Artificial Sequence
  Homo_sapiens_Q08334_I10R2_HUMAN
MAWSLGSWLGGCLLVSALG

SEQ ID NO: 206 - protein, 19 aa, Artificial Sequence
  Homo_sapiens_P00747_PLMN_HUMAN
MEHKEVVLLLLLFLKSGQG

SEQ ID NO: 207 - protein, 19 aa, Artificial Sequence
  Homo_sapiens_P01764_HV303_HUMAN
MEFGLSWLFLVAILKGVQC

SEQ ID NO: 208 - protein, 19 aa, Artificial Sequence
  Homo_sapiens_Q8NI17_IL31R_HUMAN
MMWTWALWMLPSLCKFSLA

SEQ ID NO: 209 - protein, 19 aa, Artificial Sequence
  Homo_sapiens_P32004_L1CAM_HUMAN
MVVALRYVWPLLLCSPCLL

SEQ ID NO: 210 - protein, 19 aa, Artificial Sequence
  Homo_sapiens_O14773_TPP1_HUMAN
MGLQACLLGLFALILSGKC

SEQ ID NO: 211 - protein, 19 aa, Artificial Sequence
  Homo_sapiens_Q86YT9_JAML1_HUMAN
MFCPLKLILLPVLLDYSLG

SEQ ID NO: 212 - protein, 19 aa, Artificial Sequence
  Homo_sapiens_P23470_PTPRG_HUMAN
MRRLLEPCWWILFLKITSS

SEQ ID NO: 213 - protein, 19 aa, Artificial Sequence
  Homo_sapiens_P00450_CERU_HUMAN
MKILILGIFLFLCSTPAWA

SEQ ID NO: 214 - protein, 19 aa, Artificial Sequence
  Homo_sapiens_P00748_FA12_HUMAN
MRALLLLGFLLVSLESTLS

SEQ ID NO: 215 - protein, 19 aa, Artificial Sequence
  Homo_sapiens_P08493_MGP_HUMAN
MKSLILLAILAALAVVTLC

SEQ ID NO: 216 - protein, 19 aa, Artificial Sequence
  Homo_sapiens_P14780_MMP9_HUMAN
MSLWQPLVLVLLVLGCCFA

SEQ ID NO: 217 - protein, 19 aa, Artificial Sequence
  Homo_sapiens_O43866_CD5L_HUMAN
MALLFSLILAICTRPGFLA

SEQ ID NO: 218 - protein, 19 aa, Artificial Sequence
  Homo_sapiens_P15812_CD1E_HUMAN
MLLLFLLFEGLCCPGENTA

SEQ ID NO: 219 - protein, 19 aa, Artificial Sequence
  Homo_sapiens_P08887_IL6RA_HUMAN
MLAVGCALLAALLAAPGAA

SEQ ID NO: 220 - protein, 18 aa, Artificial Sequence
  Homo_sapiens_P01744_HV104_HUMAN
MDWTWILFLVAAATRVHS

SEQ ID NO: 221 - protein, 20 aa, Artificial Sequence
  Homo_sapiens_P20023_CR2_HUMAN
MGAAGLLGVFLALVAPGVLG

SEQ ID NO: 222 - protein, 20 aa, Artificial Sequence
  Homo_sapiens_Q8NAC3_I17RC_HUMAN
MPVPWFLLSLALGRSPVVLS

SEQ ID NO: 223 - protein, 20 aa, Artificial Sequence
  Homo_sapiens_O15533_TPSN_HUMAN
MKSLSLLLAVALGLATAVSA

SEQ ID NO: 224 - protein, 20 aa, Artificial Sequence
  Homo_sapiens_P04434_KV310_HUMAN
MEAPAQLLFLLLLWLPDTTR

SEQ ID NO: 225 - protein, 20 aa, Artificial Sequence
  Homo_sapiens_O95711_LY86_HUMAN
MKGFTATLFLWTLIFPSCSG

SEQ ID NO: 226 - protein, 20 aa, Artificial Sequence
  Homo_sapiens_P11226_MBL2_HUMAN
MSLFPSLPLLLLSMVAASYS

SEQ ID NO: 227 - protein, 20 aa, Artificial Sequence
  Homo_sapiens_P02708_ACHA_HUMAN
MEPWPLLLLFSLCSAGLVLG

SEQ ID NO: 228 - protein, 20 aa, Artificial Sequence
  Homo_sapiens_P28325_CYTD_HUMAN
MMWPMHTPLLLLTALMVAVA

SEQ ID NO: 229 - protein, 20 aa, Artificial Sequence
  Homo_sapiens_P06310_KV206_HUMAN
MRLPAQLLGLLMLWVPGSSG

SEQ ID NO: 230 - protein, 20 aa, Artificial Sequence
  Homo_sapiens_Q96DR8_MUCL1_HUMAN
MKFLAVLVLLGVSIFLVSAQ

SEQ ID NO: 231 - protein, 20 aa, Artificial Sequence
  Homo_sapiens_Q8N4F0_BPIL1_HUMAN
MAWASRLGLLLALLLPVVGA

SEQ ID NO: 232 - protein, 20 aa, Artificial Sequence
  Homo_sapiens_P22894_MMP8_HUMAN
MFSLKTLPFLLLLHVQISKA

SEQ ID NO: 233 - protein, 20 aa, Artificial Sequence
  Homo_sapiens_P04436_TVA1_HUMAN
IFASLLRAVIASICVVSSMA

SEQ ID NO: 234 - protein, 20 aa, Artificial Sequence
  Homo_sapiens_Q8IWL2_SFTA1_HUMAN
MWLCPLALNLILMAASGAVC

SEQ ID NO: 235 - protein, 20 aa, Artificial Sequence
  Homo_sapiens_P07360_CO8G_HUMAN
MLPPGTATLLTLLLAAGSLG

SEQ ID NO: 236 - protein, 20 aa, Artificial Sequence
  Homo_sapiens_P13611_CSPG2_HUMAN
MFINIKSILWMCSTLIVTHA

SEQ ID NO: 237 - protein, 20 aa, Artificial Sequence
  Homo_sapiens_P06307_CCKN_HUMAN
MNSGVCLCVLMAVLAAGALT

SEQ ID NO: 238 - protein, 20 aa, Artificial Sequence
  Homo_sapiens_P06315_KV501_HUMAN
MGSQVHLLSFLLLWISDTRA

SEQ ID NO: 239 - protein, 20 aa, Artificial Sequence
  Homo_sapiens_P29320_EPHA3_HUMAN
MDCQLSILLLLSCSVLDSFG

SEQ ID NO: 240 - protein, 20 aa, Artificial Sequence
  Homo_sapiens_Q12841_FSTL1_HUMAN
MWKRWLALALALVAVAWVRA

SEQ ID NO: 241 - protein, 20 aa, Artificial Sequence
  Homo_sapiens_P06727_APOA4_HUMAN
MFLKAVVLTLALVAVAGARA

SEQ ID NO: 242 - protein, 20 aa, Artificial Sequence
  Homo_sapiens_P04433_KV309_HUMAN
MEAPAQLLFLLLLWLPDTTG

SEQ ID NO: 243 - protein, 20 aa, Artificial Sequence
  Homo_sapiens_P01275_GLUC_HUMAN
MKSIYFVAGLFVMLVQGSWQ

SEQ ID NO: 244 - protein, 20 aa, Artificial Sequence
  Homo_sapiens_P09228_CYTT_HUMAN
MAWPLCTLLLLLATQAVALA

SEQ ID NO: 245 - protein, 20 aa, Artificial Sequence
  Homo_sapiens_Q86Y34_GPR97_HUMAN
MATPRGLGALLLLLLLPTSG

SEQ ID NO: 246 - protein, 20 aa, Artificial Sequence
  Homo_sapiens_P01127_PDGFB_HUMAN
MNRCWALFLSLCCYLRLVSA

SEQ ID NO: 247 - protein, 20 aa, Artificial Sequence
  Homo_sapiens_Q9H1M4_DB127_HUMAN
MGLFMIIAILLFQKPTVTEQ

SEQ ID NO: 248 - protein, 20 aa, Artificial Sequence
  Homo_sapiens_P20774_MIME_HUMAN
MKTLQSTLLLLLLVPLIKPA

SEQ ID NO: 249 - protein, 20 aa, Artificial Sequence
  Homo_sapiens_P51460_INSL3_HUMAN
MDPRLPAWALVLLGPALVFA

SEQ ID NO: 250 - protein, 20 aa, Artificial Sequence
  Homo_sapiens_P61769_B2MG_HUMAN
MSRSVALAVLALLSLSGLEA

SEQ ID NO: 251 - protein, 20 aa, Artificial Sequence
  Homo_sapiens_P00749_UROK_HUMAN
MRALLARLLLCVLVVSDSKG

SEQ ID NO: 252 - protein, 20 aa, Artificial Sequence
  Homo_sapiens_P03979_TVC_HUMAN
MRWALLVLLAFLSPASQKSS

SEQ ID NO: 253 - protein, 20 aa, Artificial Sequence
  Homo_sapiens_Q01344_IL5RA_HUMAN
MIIVAHVLLILLGATEILQA

SEQ ID NO: 254 - protein, 20 aa, Artificial Sequence
  Homo_sapiens_P07498_CASK_HUMAN
MKSFLLVVNALALTLPFLAV

SEQ ID NO: 255 - protein, 20 aa, Artificial Sequence
  Homo_sapiens_P05160_F13B_HUMAN
MRLKNLTFIIILIISGELYA

SEQ ID NO: 256 - protein, 20 aa, Artificial Sequence
  Homo_sapiens_Q96PD4_IL17F_HUMAN
MVKYLLLSILGLAFLSEAAA

SEQ ID NO: 257 - protein, 20 aa, Artificial Sequence
  Homo_sapiens_P01037_CYTN_HUMAN
MAQHLSTLLLLLATLAVALA

SEQ ID NO: 258 - protein, 20 aa, Artificial Sequence
  Homo_sapiens_Q96QR1_SG3A1_HUMAN
MKLAALLGLCVALSCSSAAA

SEQ ID NO: 259 - protein, 20 aa, Artificial Sequence
  Homo_sapiens_P01737_TVA3_HUMAN
MLLLLVPVLEVIFTLGGTRA

SEQ ID NO: 260 - protein, 20 aa, Artificial Sequence
  Homo_sapiens_Q13145_BAMBI_HUMAN
MDRHSSYIFIWLQLELCAMA

SEQ ID NO: 261 - protein, 20 aa, Artificial Sequence
  Homo_sapiens_Q6UWI2_PARM1_HUMAN
MVYKTLFALCILTAGWRVQS

SEQ ID NO: 262 - protein, 20 aa, Artificial Sequence
  Homo_sapiens_O95994_AGR2_HUMAN
MEKIPVSAFLLLVALSYTLA

SEQ ID NO: 263 - protein, 20 aa, Artificial Sequence
  Homo_sapiens_P01213_PDYN_HUMAN
MAWQGLVLAACLLMFPSTTA

SEQ ID NO: 264 - protein, 20 aa, Artificial Sequence
  Homo_sapiens_P02656_APOC3_HUMAN
MQPRVLLVVALLALLASARA

SEQ ID NO: 265 - protein, 20 aa, Artificial Sequence
  Homo_sapiens_P55774_CCL18_HUMAN
MKGLAAALLVLVCTMALCSC

SEQ ID NO: 266 - protein, 20 aa, Artificial Sequence
  Homo_sapiens_P18135_KV312_HUMAN
METPAQLLFLLLLWLPDTTG

SEQ ID NO: 267 - protein, 20 aa, Artificial Sequence
  Homo_sapiens_P01222_TSHB_HUMAN
MTALFLMSMLFGLACGQAMS

SEQ ID NO: 268 - protein, 20 aa, Artificial Sequence
  Homo_sapiens_P15169_CBPN_HUMAN
MSDLLSVFLHLLLLFKLVAP

SEQ ID NO: 269 - protein, 20 aa, Artificial Sequence
  Homo_sapiens_P19835_CEL_HUMAN
MGRLQLVVLGLTCCWAVASA

SEQ ID NO: 270 - protein, 20 aa, Artificial Sequence
  Homo_sapiens_O43653_PSCA_HUMAN
MKAVLLALLMAGLALQPGTA

SEQ ID NO: 271 - protein, 20 aa, Artificial Sequence
  Homo_sapiens_P06314_KV404_HUMAN
MVLQTQVFISLLLWISGAYG

SEQ ID NO: 272 - protein, 20 aa, Artificial Sequence
  Homo_sapiens_P06681_CO2_HUMAN
MGPLMVLFCLLFLYPGLADS

SEQ ID NO: 273 - protein, 20 aa, Artificial Sequence
  Homo_sapiens_P01036_CYTS_HUMAN
MARPLCTLLLLMATLAGALA

SEQ ID NO: 274 - protein, 19 aa, Artificial Sequence
  IgG_heavy chain
MEFGLSWVFLVALFRGVQC

SEQ ID NO: 275 - protein, 14 aa, Artificial Sequence
  Homo_sapiens_IL-2
MQLLSCIALILALV

SEQ ID NO: 276 - protein, 20 aa, Artificial Sequence
  Homo_sapiens_Q6UWL6_KIRR2_HUMAN
MLRMRVPALLVLLFCFRGRA

SEQ ID NO: 277 - protein, 20 aa, Artificial Sequence
  Homo_sapiens_P80188_NGAL_HUMAN
MPLGLLWLGLALLGALHAQA

SEQ ID NO: 278 - protein, 20 aa, Artificial Sequence
  Homo_sapiens_P14555_PA2GA_HUMAN
MKTLLLLAVIMIFGLLQAHG

SEQ ID NO: 279 - protein, 20 aa, Artificial Sequence
  Homo_sapiens_P05543_THBG_HUMAN
MSPFLYLVLLVLGLHATIHC

SEQ ID NO: 280 - protein, 20 aa, Artificial Sequence
  Homo_sapiens_P51688_SPHM_HUMAN
MSCPVPACCALLLVLGLCRA

SEQ ID NO: 281 - protein, 20 aa, Artificial Sequence
  Homo_sapiens_P25942_TNR5_HUMAN
MVRLPLQCVLWGCLLTAVHP

SEQ ID NO: 282 - protein, 20 aa, Artificial Sequence
  Homo_sapiens_O95399_UTS2_HUMAN
MYKLASCCLLFIGFLNPLLS

SEQ ID NO: 283 - protein, 20 aa, Artificial Sequence
  Homo_sapiens_P01233_CGHB_HUMAN
MEMFQGLLLLLLLSMGGTWA

SEQ ID NO: 284 - protein, 20 aa, Artificial Sequence
  Homo_sapiens_Q12860_CNTN1_HUMAN
MKMWLLVSHLVIISITTCLA

SEQ ID NO: 285 - protein, 20 aa, Artificial Sequence
  Homo_sapiens_P21741_MK_HUMAN
MQHRGFLLLTLLALLALTSA

SEQ ID NO: 286 - protein, 20 aa, Artificial Sequence
  Homo_sapiens_P08118_MSMB_HUMAN
MNVLLGSVVIFATFVTLCNA

SEQ ID NO: 287 - protein, 20 aa, Artificial Sequence
  Homo_sapiens_O60602_TLR5_HUMAN
MGDHLDLLLGVVLMAGPVFG

SEQ ID NO: 288 - protein, 20 aa, Artificial Sequence
  Homo_sapiens_P02766_TTHY_HUMAN
MASHRLLLLCLAGLVFVSEA

SEQ ID NO: 289 - protein, 20 aa, Artificial Sequence
  Homo_sapiens_Q6UX52_CQ099_HUMAN
MGLPGLFCLAVLAASSFSKA

SEQ ID NO: 290 - protein, 20 aa, Artificial Sequence
  Homo_sapiens_P16871_IL7RA_HUMAN
MTILGTTFGMVFSLLQVVSG

SEQ ID NO: 291 - protein, 20 aa, Artificial Sequence
  Homo_sapiens_P01229_LSHB_HUMAN
MEMLQGLLLLLLLSMGGAWA

SEQ ID NO: 292 - protein, 20 aa, Artificial Sequence
  Homo_sapiens_P04085_PDGFA_HUMAN
MRTLACLLLLGCGYLAHVLA

SEQ ID NO: 293 - protein, 20 aa, Artificial Sequence
  Homo_sapiens_P05090_APOD_HUMAN
MVMLLLLLSALAGLFGAAEG

SEQ ID NO: 294 - protein, 20 aa, Artificial Sequence
  Homo_sapiens_Q04844_ACHE_HUMAN
MARAPLGVLLLLGLLGRGVG

SEQ ID NO: 295 - protein, 20 aa, Artificial Sequence
  Homo_sapiens_P35225_IL13_HUMAN
MALLLTTVIALTCLGGFASP

SEQ ID NO: 296 - protein, 20 aa, Artificial Sequence
  Homo_sapiens_Q14210_LY6D_HUMAN
MRTALLLLAALAVATGPALT

SEQ ID NO: 297 - protein, 20 aa, Artificial Sequence
  Homo_sapiens_P60568_IL2_HUMAN
MYRMQLLSCIALSLALVTNS

SEQ ID NO: 298 - protein, 20 aa, Artificial Sequence
  Homo_sapiens_P05060_SCG1_HUMAN
MQPTLLLSLLGAVGLAAVNS

SEQ ID NO: 299 - protein, 20 aa, Artificial Sequence
  Homo_sapiens_P05013_IFNA6_HUMAN
MALPFALLMALVVLSCKSSC

SEQ ID NO: 300 - protein, 20 aa, Artificial Sequence
  Homo_sapiens_P10145_IL8_HUMAN
MTSKLAVALLAAFLISAALC

SEQ ID NO: 301 - protein, 20 aa, Artificial Sequence
  Homo_sapiens_Q8IWL1_SFTA2_HUMAN
MWLCPLALNLILMAASGAAC

SEQ ID NO: 302 - protein, 20 aa, Artificial Sequence
  Homo_sapiens_O75711_SCRG1_HUMAN
MKLMVLVFTIGLTLLLGVQA

SEQ ID NO: 303 - protein, 20 aa, Artificial Sequence
  Homo_sapiens_P16473_TSHR_HUMAN
MRPADLLQLVLLLDLPRDLG

SEQ ID NO: 304 - protein, 21 aa, Artificial Sequence
  Homo_sapiens_P02778_CXL10_HUMAN
MNQTAILICCLIFLTLSGIQG

SEQ ID NO: 305 - protein, 21 aa, Artificial Sequence
  Homo_sapiens_P22455_FGFR4_HUMAN
MRLLLALLGVLLSVPGPPVLS

SEQ ID NO: 306 - protein, 21 aa, Artificial Sequence
  Homo_sapiens_Q9UBD3_XCL2_HUMAN
MRLLILALLGICSLTAYIVEG

SEQ ID NO: 307 - protein, 21 aa, Artificial Sequence
  Homo_sapiens_Q6XE38_SG1D4_HUMAN
MRLSVCLLMVSLALCCYQAHA

SEQ ID NO: 308 - protein, 21 aa, Artificial Sequence
  Homo_sapiens_Q8N6Q3_CD177_HUMAN
MSAVLLLALLGFILPLPGVQA

SEQ ID NO: 309 - protein, 21 aa, Artificial Sequence
  Homo_sapiens_P14222_PERF_HUMAN
MAARLLLLGILLLLLPLPVPA

SEQ ID NO: 310 - protein, 21 aa, Artificial Sequence
  Homo_sapiens_P55000_SLUR1_HUMAN
MASRWAVQLLLVAAWSMGCGE

SEQ ID NO: 311 - protein, 21 aa, Artificial Sequence
  Homo_sapiens_Q86T13_CLC14_HUMAN
MRPAFALCLLWQALWPGPGGG

SEQ ID NO: 312 - protein, 21 aa, Artificial Sequence
  Homo_sapiens_P13747_HLAE_HUMAN
MVDGTLLLLLSEALALTQTWA

SEQ ID NO: 313 - protein, 21 aa, Artificial Sequence
  Homo_sapiens_Q96FE7_P3IP1_HUMAN
MLLAWVQAFLVSNMLLAEAYG

SEQ ID NO: 314 - protein, 21 aa, Artificial Sequence
  Homo_sapiens_Q07092_COGA1_HUMAN
MWVSWAPGLWLLGLWATFGHG

SEQ ID NO: 315 - protein, 21 aa, Artificial Sequence
  Homo_sapiens_P04234_CD3D_HUMAN
MEHSTFLSGLVLATLLSQVSP

SEQ ID NO: 316 - protein, 21 aa, Artificial Sequence
  Homo_sapiens_Q6UWE3_CF126_HUMAN
MAAALALVAGVLSGAVLPLWS

SEQ ID NO: 317 - protein, 21 aa, Artificial Sequence
  Homo_sapiens_Q99795_GPA33_HUMAN
MVGKMWPVLWTLCAVRVTVDA

SEQ ID NO: 318 - protein, 21 aa, Artificial Sequence
  Homo_sapiens_P01574_IFNB_HUMAN
MTNKCLLQIALLLCFSTTALS

SEQ ID NO: 319 - protein, 21 aa, Artificial Sequence
  Homo_sapiens_Q9UK55_ZPI_HUMAN
MKVVPSLLLSVLLAQVWLVPG

SEQ ID NO: 320 - protein, 21 aa, Artificial Sequence
  Homo_sapiens_Q99435_NELL2_HUMAN
MESRVLLRTFCLIFGLGAVWG

SEQ ID NO: 321 - protein, 21 aa, Artificial Sequence
  Homo_sapiens_Q9GZM7_TINAL_HUMAN
MWRCPLGLLLLLPLAGHLALG

SEQ ID NO: 322 - protein, 21 aa, Artificial Sequence
  Homo_sapiens_P01732_CD8A_HUMAN
MALPVTALLLPLALLLHAARP

SEQ ID NO: 323 - protein, 21 aa, Artificial Sequence
  Homo_sapiens_P19438_TNR1A_HUMAN
MGLSTVPDLLLPLVLLELLVG

SEQ ID NO: 324 - protein, 21 aa, Artificial Sequence
  Homo_sapiens_Q8TD06_AGR3_HUMAN
MMLHSALGLCLLLVTVSSNLA

SEQ ID NO: 325 - protein, 21 aa, Artificial Sequence
  Homo_sapiens_P43251_BTD_HUMAN
MSGARSKLALFLCGCYVVALG

SEQ ID NO: 326 - protein, 21 aa, Artificial Sequence
  Homo_sapiens_P54107_CRIS1_HUMAN
MEIKHLLFLVAAACLLPMLSM

SEQ ID NO: 327 - protein, 21 aa, Artificial Sequence
  Homo_sapiens_Q99731_CCL19_HUMAN
MALLLALSLLVLWTSPAPTLS

SEQ ID NO: 328 - protein, 21 aa, Artificial Sequence
  Homo_sapiens_P04435_TVB2_HUMAN
MGTSLLCWMALCLLGADHADT

SEQ ID NO: 329 - protein, 21 aa, Artificial Sequence
  Homo_sapiens_P36222_CH3L1_HUMAN
MGVKASQTGFVVLVLLQCCSA

SEQ ID NO: 330 - protein, 21 aa, Artificial Sequence
  Homo_sapiens_P55083_MFAP4_HUMAN
MKALLALPLLLLLSTPPCAPQ

SEQ ID NO: 331 - protein, 21 aa, Artificial Sequence
  Homo_sapiens_P10966_CD8B_HUMAN
MRPRLWLLLAAQLTVLHGNSV

SEQ ID NO: 332 - protein, 21 aa, Artificial Sequence
  Homo_sapiens_O14786_NRP1_HUMAN
MERGLPLLCAVLALVLAPAGA

SEQ ID NO: 333 - protein, 21 aa, Artificial Sequence
  Homo_sapiens_O14625_CXL11_HUMAN
MSVKGMAIALAVILCATVVQG

SEQ ID NO: 334 - protein, 21 aa, Artificial Sequence
  Homo_sapiens_Q6UWM7_LCTL_HUMAN
MKPVWVATLLWMLLLVPRLGA

SEQ ID NO: 335 - protein, 21 aa, Artificial Sequence
  Homo_sapiens_Q9UIB8_SLAF5_HUMAN
MAQHHLWILLLCLQTWPEAAG

SEQ ID NO: 336 - protein, 21 aa, Artificial Sequence
  Homo_sapiens_P04217_A1BG_HUMAN
MSMLVVFLLLWGVTWGPVTEA

SEQ ID NO: 337 - protein, 21 aa, Artificial Sequence
  Homo_sapiens_P48357_LEPR_HUMAN
MICQKFCVVLLHWEFIYVITA

SEQ ID NO: 338 - protein, 21 aa, Artificial Sequence
  Homo_sapiens_Q6UXB2_VCC1_HUMAN
MKVLISSLLLLLPLMLMSMVS

SEQ ID NO: 339 - protein, 21 aa, Artificial Sequence
  Homo_sapiens_Q9UBP4_DKK3_HUMAN
MQRLGATLLCLLLAAAVPTAP

SEQ ID NO: 340 - protein, 21 aa, Artificial Sequence
  Homo_sapiens_P01569_IFNA5_HUMAN
MALPFVLLMALVVLNCKSICS

SEQ ID NO: 341 - protein, 21 aa, Artificial Sequence
  Homo_sapiens_P01589_IL2RA_HUMAN
MDSYLLMWGLLTFIMVPGCQA

SEQ ID NO: 342 - protein, 21 aa, Artificial Sequence
  Homo_sapiens_Q96PD5_PGRP2_HUMAN
MAQGVLWILLGLLLWSDPGTA

SEQ ID NO: 343 - protein, 21 aa, Artificial Sequence
  Homo_sapiens_P26885_FKBP2_HUMAN
MRLSWFRVLTVLSICLSAVAT

SEQ ID NO: 344 - protein, 21 aa, Artificial Sequence
  Homo_sapiens_Q969J5_I22R2_HUMAN
MMPKHCFLGFLISFFLTGVAG

SEQ ID NO: 345 - protein, 21 aa, Artificial Sequence
  Homo_sapiens_Q96DU3_SLAF6_HUMAN
MLWLFQSLLFVFCFGPGNVVS

SEQ ID NO: 346 - protein, 21 aa, Artificial Sequence
  Homo_sapiens_P05452_TETN_HUMAN
MELWGAYLLLCLFSLLTQVTT

SEQ ID NO: 347 - protein, 21 aa, Artificial Sequence
  Homo_sapiens_Q16663_CCL15_HUMAN
MKVSVAALSCLMLVAVLGSQA

SEQ ID NO: 348 - protein, 21 aa, Artificial Sequence
  Homo_sapiens_Q6YHK3_CD109_HUMAN
MQGPPLLTAAHLLCVCTAALA

SEQ ID NO: 349 - protein, 21 aa, Artificial Sequence
  Homo_sapiens_Q969N2_PIGT_HUMAN
MAAAMPLALLVLLLLGPGGWC

SEQ ID NO: 350 - protein, 21 aa, Artificial Sequence
  Homo_sapiens_P11684_UTER_HUMAN
MKLAVTLTLVTLALCCSSASA

SEQ ID NO: 351 - protein, 21 aa, Artificial Sequence
  Homo_sapiens_P13671_CO6_HUMAN
MARRSVLYFILLNALINKGQA

SEQ ID NO: 352 - protein, 21 aa, Artificial Sequence
  Homo_sapiens_Q07654_TFF3_HUMAN
MAARALCMLGLVLALLSSSSA

SEQ ID NO: 353 - protein, 21 aa, Artificial Sequence
  Homo_sapiens_Q6UWV6_ENPP7_HUMAN
MRGLAVLLTVALATLLAPGAG

SEQ ID NO: 354 - protein, 21 aa, Artificial Sequence
  Homo_sapiens_P22692_IBP4_HUMAN
MLPLCLVAALLLAAGPGPSLG

SEQ ID NO: 355 - protein, 21 aa, Artificial Sequence
  Homo_sapiens_P43626_KI2L1_HUMAN
MSLLVVSMACVGFFLLQGAWP

SEQ ID NO: 356 - protein, 21 aa, Artificial Sequence
  Homo_sapiens_P20963_CD3Z_HUMAN
MKWKALFTAAILQAQLPITEA

SEQ ID NO: 357 - protein, 21 aa, Artificial Sequence
  Homo_sapiens_O95968_SG1D1_HUMAN
MRLSVCLLLLTLALCCYRANA

SEQ ID NO: 358 - protein, 21 aa, Artificial Sequence
  Homo_sapiens_Q6E0U4_DMKN_HUMAN
MKFQGPLACLLLALCLGSGEA

SEQ ID NO: 359 - protein, 21 aa, Artificial Sequence
  Homo_sapiens_P40225_TPO_HUMAN
MELTELLLVVMLLLTARLTLS

SEQ ID NO: 360 - protein, 21 aa, Artificial Sequence
  Homo_sapiens_P55145_ARMET_HUMAN
MWATQGLAVALALSVLPGSRA

SEQ ID NO: 361 - protein, 21 aa, Artificial Sequence
  Homo_sapiens_P14625_ENPL_HUMAN
MRALWVLGLCCVLLTFGSVRA

SEQ ID NO: 362 - protein, 21 aa, Artificial Sequence
  Homo_sapiens_P30511_HLAF_HUMAN
MAPRSLLLLLSGALALTDTWA

SEQ ID NO: 363 - protein, 21 aa, Artificial Sequence
  Homo_sapiens_P05000_IFNW1_HUMAN
MALLFPLLAALVMTSYSPVGS

SEQ ID NO: 364 - protein, 21 aa, Artificial Sequence
  Homo_sapiens_P35613_BASI_HUMAN
MAAALFVLLGFALLGTHGASG

SEQ ID NO: 365 - protein, 21 aa, Artificial Sequence
  Homo_sapiens_P35318_ADML_HUMAN
MKLVSVALMYLGSLAFLGADT

SEQ ID NO: 366 - protein, 21 aa, Artificial Sequence
  Homo_sapiens_P55773_CCL23_HUMAN
MKVSVAALSCLMLVTALGSQA

SEQ ID NO: 367 - protein, 21 aa, Artificial Sequence
  Homo_sapiens_Q9Y240_CLC11_HUMAN
MQAAWLLGALVVPQLLGFGHG

SEQ ID NO: 368 - protein, 21 aa, Artificial Sequence
  Homo_sapiens_P01350_GAST_HUMAN
MQRLCVYVLIFALALAAFSEA

SEQ ID NO: 369 - protein, 21 aa, Artificial Sequence
  Homo_sapiens_P01130_LDLR_HUMAN
MGPWGWKLRWTVALLLAAAGT

SEQ ID NO: 370 - protein, 21 aa, Artificial Sequence
  Homo_sapiens_Q96RQ9_OXLA_HUMAN
MAPLALHLLVLVPILLSLVAS

SEQ ID NO: 371 - protein, 21 aa, Artificial Sequence
  Homo_sapiens_P35590_TIE1_HUMAN
MVWRVPPFLLPILFLASHVGA

SEQ ID NO: 372 - protein, 21 aa, Artificial Sequence
  Homo_sapiens_P08842_STS_HUMAN
MPLRKMKIPFLLLFFLWEAES

SEQ ID NO: 373 - protein, 21 aa, Artificial Sequence
  Homo_sapiens_P13686_PPA5_HUMAN
MDMWTALLILQALLLPSLADG

SEQ ID NO: 374 - protein, 21 aa, Artificial Sequence
  Homo_sapiens_Q13093_PAFA_HUMAN
MVPPKLHVLFCLCGCLAVVYP

SEQ ID NO: 375 - protein, 21 aa, Artificial Sequence
  Homo_sapiens_P07942_LAMB1_HUMAN
MGLLQLLAFSFLALCRARVRA

SEQ ID NO: 376 - protein, 21 aa, Artificial Sequence
  Homo_sapiens_O00300_TR11B_HUMAN
MNKLLCCALVFLDISIKWTTQ

SEQ ID NO: 377 - protein, 21 aa, Artificial Sequence
  Homo_sapiens_P02748_CO9_HUMAN
MSACRSFAVAICILEISILTA

SEQ ID NO: 378 - protein, 21 aa, Artificial Sequence
  Homo_sapiens_P56202_CATW_HUMAN
MALTAHPSCLLALLVAGLAQG

SEQ ID NO: 379 - protein, 21 aa, Artificial Sequence
  Homo_sapiens_Q9BZW8_CD244_HUMAN
MLGQVVTLILLLLLKVYQGKG

SEQ ID NO: 380 - protein, 21 aa, Artificial Sequence
  Homo_sapiens_Q13231_CHIT1_HUMAN
MVRSVAWAGFMVLLMIPWGSA

SEQ ID NO: 381 - protein, 21 aa, Artificial Sequence
  Homo_sapiens_P16581_LYAM2_HUMAN
MIASQFLSALTLVLLIKESGA

SEQ ID NO: 382 - protein, 21 aa, Artificial Sequence
  Homo_sapiens_Q02747_GUC2A_HUMAN
MNAFLLFALCLLGAWAALAGG

SEQ ID NO: 383 - protein, 21 aa, Artificial Sequence
  Homo_sapiens_Q13651_I10R1_HUMAN
MLPCLVVLLAALLSLRLGSDA

SEQ ID NO: 384 - protein, 21 aa, Artificial Sequence
  Homo_sapiens_Q9NPY3_C1QR1_HUMAN
MATSMGLLLLLLLLLTQPGAG

SEQ ID NO: 385 - protein, 22 aa, Artificial Sequence
  Homo_sapiens_P04844_RPN2_HUMAN
MAPPGSSTVFLLALTIIASTWA

SEQ ID NO: 386 - protein, 22 aa, Artificial Sequence
  Homo_sapiens_Q95460_HMR1_HUMAN
MGELMAFLLPLIIVLMVKHSDS

SEQ ID NO: 387 - protein, 22 aa, Artificial Sequence
  Homo_sapiens_P07766_CD3E_HUMAN
MQSGTHWRVLGLCLLSVGVWGQ

SEQ ID NO: 388 - protein, 22 aa, Artificial Sequence
  Homo_sapiens_P01601_KV109_HUMAN
MDMRVLAQLLGLLLLCFPGARC

SEQ ID NO: 389 - protein, 22 aa, Artificial Sequence
  Homo_sapiens_Q9NRR1_CYTL1_HUMAN
MRTPGPLPVLLLLLAGAPAARP

SEQ ID NO: 390 - protein, 22 aa, Artificial Sequence
  Homo_sapiens_Q16602_CALRL_HUMAN
MEKKCTLYFLVLLPFFMILVTA

SEQ ID NO: 391 - protein, 22 aa, Artificial Sequence
  Homo_sapiens_P08185_CBG_HUMAN
MPLLLYTCLLWLPTSGLWTVQA

SEQ ID NO: 392 - protein, 22 aa, Artificial Sequence
  Homo_sapiens_P15509_CSF2R_HUMAN
MLLLVTSLLLCELPHPAFLLIP

SEQ ID NO: 393 - protein, 22 aa, Artificial Sequence
  Homo_sapiens_P01024_CO3_HUMAN
MGPTSGPSLLLLLLTHLPLALG

SEQ ID NO: 394 - protein, 22 aa, Artificial Sequence
  Homo_sapiens_P05155_IC1_HUMAN
MASRLTLLTLLLLLLAGDRASS

SEQ ID NO: 395 - protein, 22 aa, Artificial Sequence
  Homo_sapiens_P05107_ITB2_HUMAN
MLGLRPPLLALVGLLSLGCVLS

SEQ ID NO: 396 - protein, 22 aa, Artificial Sequence
  Homo_sapiens_P29459_IL12A_HUMAN
MCPARSLLLVATLVLLDHLSLA

SEQ ID NO: 397 - protein, 22 aa, Artificial Sequence
  Homo_sapiens_P04156_PRIO_HUMAN
MANLGCWMLVLFVATWSDLGLC

SEQ ID NO: 398 - protein, 22 aa, Artificial Sequence
  Homo_sapiens_P04275_VWF_HUMAN
MIPARFAGVLLALALILPGTLC

SEQ ID NO: 399 - protein, 22 aa, Artificial Sequence
  Homo_sapiens_Q03405_UPAR_HUMAN
MGHPPLLPLLLLLHTCVPASWG

SEQ ID NO: 400 - protein, 22 aa, Artificial Sequence
  Homo_sapiens_P02655_APOC2_HUMAN
MGTRLLPALFLVLLVLGFEVQG

SEQ ID NO: 401 - protein, 22 aa, Artificial Sequence
  Homo_sapiens_P06865_HEXA_HUMAN
MTSSRLWFSLLLAAAFAGRATA

SEQ ID NO: 402 - protein, 22 aa, Artificial Sequence
  Homo_sapiens_P49862_KLK7_HUMAN
MARSLLLPLQILLLSLALETAG

SEQ ID NO: 403 - protein, 22 aa, Artificial Sequence
  Homo_sapiens_P21941_MATN1_HUMAN
MRVLSGTSLMLCSLLLLLQALC

SEQ ID NO: 404 - protein, 22 aa, Artificial Sequence
  Homo_sapiens_P11150_LIPC_HUMAN
MDTSPLCFSILLVLCIFIQSSA

SEQ ID NO: 405 - protein, 22 aa, Artificial Sequence
  Homo_sapiens_P29460_IL12B_HUMAN
MCHQQLVISWFSLVFLASPLVA

SEQ ID NO: 406 - protein, 22 aa, Artificial Sequence
  Homo_sapiens_P09668_CATH_HUMAN
MWATLPLLCAGAWLLGVPVCGA

SEQ ID NO: 407 - protein, 22 aa, Artificial Sequence
  Homo_sapiens_Q30201_HFE_HUMAN
MGPRARPALLLLMLLQTAVLQG

SEQ ID NO: 408 - protein, 22 aa, Artificial Sequence
  Homo_sapiens_P04431_KV123_HUMAN
MDMRVPAQLLGLLLLWLRGARC

SEQ ID NO: 409 - protein, 22 aa, Artificial Sequence
  Homo_sapiens_P41222_PTGDS_HUMAN
MATHHTLWMGLALLGVLGDLQA

SEQ ID NO: 410 - protein, 22 aa, Artificial Sequence
  Homo_sapiens_P15018_LIF_HUMAN
MKVLAAGVVPLLLVLHWKHGAG

SEQ ID NO: 411 - protein, 22 aa, Artificial Sequence
  Homo_sapiens_P05187_PPB1_HUMAN
MLGPCMLLLLLLLGLRLQLSLG

SEQ ID NO: 412 - protein, 22 aa, Artificial Sequence
  Homo_sapiens_Q9NPG1_FZD3_HUMAN
MAMTWIVFSLWPLTVFMGHIGG

SEQ ID NO: 413 - protein, 22 aa, Artificial Sequence
  Homo_sapiens_O95445_APOM_HUMAN
MFHQIWAALLYFYGIILNSIYQ

SEQ ID NO: 414 - protein, 22 aa, Artificial Sequence
  Homo_sapiens_P00750_TPA_HUMAN
MDAMKRGLCCVLLLCGAVFVSP

SEQ ID NO: 415 - protein, 22 aa, Artificial Sequence
  Homo_sapiens_P02745_C1QA_HUMAN
MEGPRGWLVLCVLAISLASMVT

SEQ ID NO: 416 - protein, 22 aa, Artificial Sequence
  Homo_sapiens_P24821_TENA_HUMAN
MGAMTQLLAGVFLAFLALATEG

SEQ ID NO: 417 - protein, 22 aa, Artificial Sequence
  Homo_sapiens_P40189_IL6RB_HUMAN
MLTLQTWLVQALFIFLTTESTG

SEQ ID NO: 418 - protein, 22 aa, Artificial Sequence
  Homo_sapiens_P31785_IL2RG_HUMAN
MLKPSLPFTSLLFLQLPLLGVG

SEQ ID NO: 419 - protein, 22 aa, Artificial Sequence
  Homo_sapiens_P05451_REG1A_HUMAN
MAQTSSYFMLISCLMFLSQSQG

SEQ ID NO: 420 - protein, 22 aa, Artificial Sequence
  Homo_sapiens_P02814_SMR3B_HUMAN
MKSLTWILGLWALAACFTPGES

SEQ ID NO: 421 - protein, 22 aa, Artificial Sequence
  Homo_sapiens_P37173_TGFR2_HUMAN
MGRGLLRGLWPLHIVLWTRIAS

SEQ ID NO: 422 - protein, 22 aa, Artificial Sequence
  Homo_sapiens_Q86Y78_LYPD6_HUMAN
MEPGPALAWLLLLSLLADCLKA

SEQ ID NO: 423 - protein, 22 aa, Artificial Sequence
  Homo_sapiens_Q02763_TIE2_HUMAN
MDSLASLVLCGVSLLLSGTVEG

SEQ ID NO: 424 - protein, 22 aa, Artificial Sequence
  Homo_sapiens_P19957_ELAF_HUMAN
MRASSFLIVVVFLIAGTLVLEA

SEQ ID NO: 425 - protein, 22 aa, Artificial Sequence
  Homo_sapiens_P24855_DNAS1_HUMAN
MRGMKLLGALLALAALLQGAVS

SEQ ID NO: 426 - protein, 22 aa, Artificial Sequence
  Homo_sapiens_Q86SN1_Q86SN1_HUMAN
MAAGTAVGAWVLVLSLWGAVVG

SEQ ID NO: 427 - protein, 22 aa, Artificial Sequence
  Homo_sapiens_Q9P0V8_SLAF8_HUMAN
MVMRPLWSLLLWEALLPITVTG

SEQ ID NO: 428 - protein, 22 aa, Artificial Sequence
  Homo_sapiens_Q08830_FGL1_HUMAN
MAKVFSFILVTTALTMGREISA

SEQ ID NO: 429 - protein, 22 aa, Artificial Sequence
  Homo_sapiens_P81534_D103A_HUMAN
MRIHYLLFALLFLFLVPVPGHG

SEQ ID NO: 430 - protein, 22 aa, Artificial Sequence
  Homo_sapiens_Q9NQ25_SLAF7_HUMAN
MAGSPTCLTLIYILWQLTGSAA

SEQ ID NO: 431 - protein, 22 aa, Artificial Sequence
  Homo_sapiens_P01602_KV110_HUMAN
MDMRVPAQLLGLLLLWLPGAKC

SEQ ID NO: 432 - protein, 22 aa, Artificial Sequence
  Homo_sapiens_P09693_CD3G_HUMAN
MEQGKGLAVLILAIILLQGTLA

SEQ ID NO: 433 - protein, 22 aa, Artificial Sequence
  Homo_sapiens_P10643_CO7_HUMAN
MKVISLFILVGFIGEFQSFSSA

SEQ ID NO: 434 - protein, 22 aa, Artificial Sequence
  Homo_sapiens_O95157_NXPH3_HUMAN
MQLTRCCFVFLVQGSLYLVICG

SEQ ID NO: 435 - protein, 22 aa, Artificial Sequence
  Homo_sapiens_Q9Y5H9_PCDA2_HUMAN
MASSIRRGRGAWTRLLSLLLLA

SEQ ID NO: 436 - protein, 22 aa, Artificial Sequence
  Homo_sapiens_P48307_TFPI2_HUMAN
MDPARPLGLSILLLFLTEAALG

SEQ ID NO: 437 - protein, 22 aa, Artificial Sequence
  Homo_sapiens_P14209_CD99_HUMAN
MARGAALALLLFGLLGVLVAAP

SEQ ID NO: 438 - protein, 22 aa, Artificial Sequence
  Homo_sapiens_Q07325_CXCL9_HUMAN
MKKSGVLFLLGIILLVLIGVQG

SEQ ID NO: 439 - protein, 22 aa, Artificial Sequence
  Homo_sapiens_P22607_FGFR3_HUMAN
MGAPACALALCVAVAIVAGASS

SEQ ID NO: 440 - protein, 22 aa, Artificial Sequence
  Homo_sapiens_P02452_CO1A1_HUMAN
MFSFVDLRLLLLLAATALLTHG

SEQ ID NO: 441 - protein, 22 aa, Artificial Sequence
  Homo_sapiens_Q96S96_PEBP4_HUMAN
MGWTMRLVTAALLLGLMMVVTG

SEQ ID NO: 442 - protein, 22 aa, Artificial Sequence
  Homo_sapiens_P08236_BGLR_HUMAN
MARGSAVAWAALGPLLWGCALG

SEQ ID NO: 443 - protein, 22 aa, Artificial Sequence
  Homo_sapiens_P10909_CLUS_HUMAN
MMKTLLLFVGLLLTWESGQVLG

SEQ ID NO: 444 - protein, 22 aa, Artificial Sequence
  Homo_sapiens_Q92563_TICN2_HUMAN
MRAPGCGRLVLPLLLLAAAALA

SEQ ID NO: 445 - protein, 22 aa, Artificial Sequence
  Homo_sapiens_P04432_KV124_HUMAN
MDMRVPAQLLGLLLLWLRRVRC

SEQ ID NO: 446 - protein, 22 aa, Artificial Sequence
  Homo_sapiens_Q8NC67_NETO2_HUMAN
MALERLCSVLKVLLITVLVVEG

SEQ ID NO: 447 - protein, 22 aa, Artificial Sequence
  Homo_sapiens_Q9BYZ8_REG4_HUMAN
MASRSMRLLLLLSCLAKTGVLG

SEQ ID NO: 448 - protein, 22 aa, Artificial Sequence
  Homo_sapiens_Q9Y5Q6_INSL5_HUMAN
MKGSIFTLFLFSVLFAISEVRS

SEQ ID NO: 449 - protein, 22 aa, Artificial Sequence
  Homo_sapiens_Q96BF3_TMIG2_HUMAN
MGSPGMVLGLLVQIWALQEASS

SEQ ID NO: 450 - protein, 22 aa, Artificial Sequence
  Homo_sapiens_Q6UW88_EPGN_HUMAN
MALGVPISVYLLFNAMTALTEE

SEQ ID NO: 451 - protein, 22 aa, Artificial Sequence
  Homo_sapiens_Q6UWM5_GPRL1_HUMAN
MALKNKFSCLWILGLCLVATTS

SEQ ID NO: 452 - protein, 22 aa, Artificial Sequence
  Homo_sapiens_P20333_TNR1B_HUMAN
MAPVAVWAALAVGLELWAAAHA

SEQ ID NO: 453 - protein, 22 aa, Artificial Sequence
  Homo_sapiens_Q8NBM8_PCYXL_HUMAN
MARAPPLLAALTALLAAAAAGG

SEQ ID NO: 454 - protein, 23 aa, Artificial Sequence
  Homo_sapiens_P01566_IFN10_HUMAN
MALSFSLLMAVLVLSYKSICSLG

SEQ ID NO: 455 - protein, 23 aa, Artificial Sequence
  Homo_sapiens_Q92583_CCL17_HUMAN
MAPLKMLALVTLLLGASLQHIHA

SEQ ID NO: 456 - protein, 23 aa, Artificial Sequence
  Homo_sapiens_P34998_CRFR1_HUMAN
MGGHPQLRLVKALLLLGLNPVSA

SEQ ID NO: 457 - protein, 23 aa, Artificial Sequence
  Homo_sapiens_O75636_FCN3_HUMAN
MDLLWILPSLWLLLLGGPACLKT

SEQ ID NO: 458 - protein, 23 aa, Artificial Sequence
  Homo_sapiens_O15467_CCL16_HUMAN
MKVSEAALSLLVLILIITSASRS

SEQ ID NO: 459 - protein, 23 aa, Artificial Sequence
  Homo_sapiens_P13236_CCL4_HUMAN
MKLCVTVLSLLMLVAAFCSPALS

SEQ ID NO: 460 - protein, 23 aa, Artificial Sequence
  Homo_sapiens_P01033_TIMP1_HUMAN
MAPFEPLASGILLLLWLIAPSRA

SEQ ID NO: 461 - protein, 23 aa, Artificial Sequence
  Homo_sapiens_P20849_CO9A1_HUMAN
MKTCWKIPVFFFVCSFLEPWASA

SEQ ID NO: 462 - protein, 23 aa, Artificial Sequence
  Homo_sapiens_Q96HE7_ERO1A_HUMAN
MGRGWGFLFGLLGAVWLLSSGHG

SEQ ID NO: 463 - protein, 23 aa, Artificial Sequence
  Homo_sapiens_Q9UKZ9_PCOC2_HUMAN
MRGANAWAPLCLLLAAATQLSRQ

SEQ ID NO: 464 - protein, 23 aa, Artificial Sequence
  Homo_sapiens_P01909_HA23_HUMAN
MILNKALMLGALALTTVMSPCGG

SEQ ID NO: 465 - protein, 23 aa, Artificial Sequence
  Homo_sapiens_P00797_RENI_HUMAN
MDGWRRMPRWGLLLLLWGSCTFG

SEQ ID NO: 466 - protein, 23 aa, Artificial Sequence
  Homo_sapiens_P13501_CCL5_HUMAN
MKVSAAALAVILIATALCAPASA

SEQ ID NO: 467 - protein, 23 aa, Artificial Sequence
  Homo_sapiens_P51671_CCL11_HUMAN
MKVSAALLWLLLIAAAFSPQGLA

SEQ ID NO: 468 - protein, 23 aa, Artificial Sequence
  Homo_sapiens_P10147_CCL3_HUMAN
MQVSTAALAVLLCTMALCNQFSA

SEQ ID NO: 469 - protein, 23 aa, Artificial Sequence
  Homo_sapiens_P16234_PGFRA_HUMAN
MGTSHPAFLVLGCLLTGLSLILC

SEQ ID NO: 470 - protein, 23 aa, Artificial Sequence
  Homo_sapiens_Q9UBU3_GHRL_HUMAN
MPSPGTVCSLLLLGMLWLDLAMA

SEQ ID NO: 471 - protein, 23 aa, Artificial Sequence
  Homo_sapiens_P22891_PROZ_HUMAN
MAGCVPLLQGLVLVLALHRVEPS

SEQ ID NO: 472 - protein, 23 aa, Artificial Sequence
  Homo_sapiens_P05536_HA27_HUMAN
MILNKALMLGSLALTTVMSPCGG

SEQ ID NO: 473 - protein, 23 aa, Artificial Sequence
  Homo_sapiens_Q16552_IL17_HUMAN
MTPGKTSLVSLLLLLSLEAIVKA

SEQ ID NO: 474 - protein, 23 aa, Artificial Sequence
  Homo_sapiens_P04279_SEMG1_HUMAN
MKPNIIFVLSLLLILEKQAAVMG

SEQ ID NO: 475 - protein, 23 aa, Artificial Sequence
  Homo_sapiens_P01907_HA25_HUMAN
MILNKALLLGALALTTVMSPCGG

SEQ ID NO: 476 - protein, 23 aa, Artificial Sequence
  Homo_sapiens_Q6UW78_CK083_HUMAN
MDSLRKMLISVAMLGAGAGVGYA

SEQ ID NO: 477 - protein, 23 aa, Artificial Sequence
  Homo_sapiens_P01563_IFNA2_HUMAN
MALTFALLVALLVLSCKSSCSVG

SEQ ID NO: 478 - protein, 23 aa, Artificial Sequence
  Homo_sapiens_P35625_TIMP3_HUMAN
MTPWLGLIVLLGSWSLGDWGAEA

SEQ ID NO: 479 - protein, 23 aa, Artificial Sequence
  Homo_sapiens_Q07011_TNR9_HUMAN
MGNSCYNIVATLLLVLNFERTRS

SEQ ID NO: 480 - protein, 23 aa, Artificial Sequence
  Homo_sapiens_P54802_ANAG_HUMAN
MEAVAVAAAVGVLLLAGAGGAAG

SEQ ID NO: 481 - protein, 23 aa, Artificial Sequence
  Homo_sapiens_Q8N6C8_LIRA3_HUMAN
MTPILTVLICLGLSLDPRTHVQA

SEQ ID NO: 482 - protein, 23 aa, Artificial Sequence
  Homo_sapiens_Q6X4U4_SOSD1_HUMAN
MLPPAIHFYLLPLACILMKSCLA

SEQ ID NO: 483 - protein, 23 aa, Artificial Sequence
  Homo_sapiens_Q14520_HABP2_HUMAN
MFARMSDLHVLLLMALVGKTACG

SEQ ID NO: 484 - protein, 23 aa, Artificial Sequence
  Homo_sapiens_O00585_CCL21_HUMAN
MAQSLALSLLILVLAFGIPRTQG

SEQ ID NO: 485 - protein, 23 aa, Artificial Sequence
  Homo_sapiens_P04843_RPN1_HUMAN
MEAPAAGLFLLLLLGTWAPAPGS

SEQ ID NO: 486 - protein, 23 aa, Artificial Sequence
  Homo_sapiens_P01023_A2MG_HUMAN
MGKNKLLHPSLVLLLLVLLPTDA

SEQ ID NO: 487 - protein, 23 aa, Artificial Sequence
  Homo_sapiens_P20155_ISK2_HUMAN
MALSVLRLALLLLAVTFAASLIP

SEQ ID NO: 488 - protein, 23 aa, Artificial Sequence
  Homo_sapiens_Q15465_SHH_HUMAN
MLLLARCLLLVLVSSLLVCSGLA

SEQ ID NO: 489 - protein, 23 aa, Artificial Sequence
  Homo_sapiens_Q8NBL1_KTEL1_HUMAN
MEWWASSPLRLWLLLFLLPSAQG

SEQ ID NO: 490 - protein, 23 aa, Artificial Sequence
  Homo_sapiens_Q02383_SEMG2_HUMAN
MKSIILFVLSLLLILEKQAAVMG

SEQ ID NO: 491 - protein, 23 aa, Artificial Sequence
  Homo_sapiens_P23219_PGH1_HUMAN
MSRSLLLRFLLFLLLLPPLPVLL

SEQ ID NO: 492 - protein, 23 aa, Artificial Sequence
  Homo_sapiens_O76076_WISP2_HUMAN
MRGTPKTHLLAFSLLCLLSKVRT

SEQ ID NO: 493 - protein, 23 aa, Artificial Sequence
  Homo_sapiens_P01011_AACT_HUMAN
MERMLPLLALGLLAAGFCPAVLC

SEQ ID NO: 494 - protein, 23 aa, Artificial Sequence
  Homo_sapiens_P55899_FCGRN_HUMAN
MGVPRPQPWALGLLLFLLPGSLG

SEQ ID NO: 495 - protein, 23 aa, Artificial Sequence
  Homo_sapiens_P01570_IFN14_HUMAN
MALPFALMMALVVLSCKSSCSLG

SEQ ID NO: 496 - protein, 23 aa, Artificial Sequence
  Homo_sapiens_Q9Y258_CCL26_HUMAN
MMGLSLASAVLLASLLSLHLGTA

SEQ ID NO: 497 - protein, 23 aa, Artificial Sequence
  Homo_sapiens_P32881_IFNA8_HUMAN
MALTFYLLVALVVLSYKSFSSLG

SEQ ID NO: 498 - protein, 23 aa, Artificial Sequence
  Homo_sapiens_P43121_MUC18_HUMAN
MGLPRLVCAFLLAACCCCPRVAG

SEQ ID NO: 499 - protein, 23 aa, Artificial Sequence
  Homo_sapiens_Q99467_CD180_HUMAN
MAFDVSCFFWVVLFSAGCKVITS

SEQ ID NO: 500 - protein, 23 aa, Artificial Sequence
  Homo_sapiens_O15455_TLR3_HUMAN
MRQTLPCIYFWGGLLPFGMLCAS

SEQ ID NO: 501 - protein, 23 aa, Artificial Sequence
  Homo_sapiens_P01567_IFNA7_HUMAN
MARSFSLLMVVLVLSYKSICSLG

SEQ ID NO: 502 - protein, 23 aa, Artificial Sequence
  Homo_sapiens_Q08431_MFGM_HUMAN
MPRPRLLAALCGALLCAPSLLVA

SEQ ID NO: 503 - protein, 23 aa, Artificial Sequence
  Homo_sapiens_P02790_HEMO_HUMAN
MARVLGAPVALGLWSLCWSLAIA

SEQ ID NO: 504 - protein, 23 aa, Artificial Sequence
  Homo_sapiens_Q96IQ7_VSIG2_HUMAN
MAELPGPFLCGALLGFLCLSGLA

SEQ ID NO: 505 - protein, 23 aa, Artificial Sequence
  Homo_sapiens_P16619_CL3L1_HUMAN
MQVSTAALAVLLCTMALCNQVLS

SEQ ID NO: 506 - protein, 23 aa, Artificial Sequence
  Homo_sapiens_P20061_TCO1_HUMAN
MRQSHQLPLVGLLLFSFIPSQLC

SEQ ID NO: 507 - protein, 23 aa, Artificial Sequence
  Homo_sapiens_P01562_IFNA1_HUMAN
MASPFALLMVLVVLSCKSSCSLG

SEQ ID NO: 508 - protein, 23 aa, Artificial Sequence
  Homo_sapiens_P22362_CCL1_HUMAN
MQIITTALVCLLLAGMWPEDVDS

SEQ ID NO: 509 - protein, 23 aa, Artificial Sequence
  Homo_sapiens_Q29983_MICA_HUMAN
MGLGPVFLLLAGIFPFAPPGAAA

SEQ ID NO: 510 - protein, 23 aa, Artificial Sequence
  Homo_sapiens_Q6UWN8_ISK6_HUMAN
MKLSGMFLLLSLALFCFLTGVFS

SEQ ID NO: 511 - protein, 23 aa, Artificial Sequence
  Homo_sapiens_P01148_GON1_HUMAN
MKPIQKLLAGLILLTWCVEGCSS

SEQ ID NO: 512 - protein, 23 aa, Artificial Sequence
  Homo_sapiens_P00995_ISK1_HUMAN
MKVTGIFLLSALALLSLSGNTGA

SEQ ID NO: 513 - protein, 23 aa, Artificial Sequence
  Homo_sapiens_P15941_MUC1_HUMAN
MTPGTQSPFFLLLLLTVLTVVTG

SEQ ID NO: 514 - protein, 23 aa, Artificial Sequence
  Homo_sapiens_P80098_CCL7_HUMAN
MKASAALLCLLLTAAAFSPQGLA

SEQ ID NO: 515 - protein, 23 aa, Artificial Sequence
  Homo_sapiens_P35052_GPC1_HUMAN
MELRARGWWLLCAAAALVACARG

SEQ ID NO: 516 - protein, 23 aa, Artificial Sequence
  Homo_sapiens_P07492_GRP_HUMAN
MRGSELPLVLLALVLCLAPRGRA

SEQ ID NO: 517 - protein, 23 aa, Artificial Sequence
  Homo_sapiens_P20933_ASPG_HUMAN
MARKSNLPVLLVPFLLCQALVRC

SEQ ID NO: 518 - protein, 23 aa, Artificial Sequence
  Homo_sapiens_P05121_PAI1_HUMAN
MQMSPALTCLVLGLALVFGEGSA

SEQ ID NO: 519 - protein, 23 aa, Artificial Sequence
  Homo_sapiens_P08575_CD45_HUMAN
MYLWLKLLAFGFAFLDTEVFVTG

SEQ ID NO: 520 - protein, 23 aa, Artificial Sequence
  Homo_sapiens_P01906_HA26_HUMAN
MILNKALLLGALALTAVMSPCGG

SEQ ID NO: 521 - protein, 23 aa, Artificial Sequence
  Homo_sapiens_P01579_IFNG_HUMAN
MKYTSYILAFQLCIVLGSLGCYC

SEQ ID NO: 522 - protein, 23 aa, Artificial Sequence
  Homo_sapiens_P23229_ITA6_HUMAN
MAAAGQLCLLYLSAGLLSRLGAA

SEQ ID NO: 523 - protein, 23 aa, Artificial Sequence
  Homo_sapiens_P13500_CCL2_HUMAN
MKVSAALLCLLLIAATFIPQGLA

SEQ ID NO: 524 - protein, 23 aa, Artificial Sequence
  Homo_sapiens_O14798_TR10C_HUMAN
MARIPKTLKFVVVIVAVLLPVLA

SEQ ID NO: 525 - protein, 23 aa, Artificial Sequence
  Homo_sapiens_P80370_DLK1_HUMAN
MTATEALLRVLLLLLAFGHSTYG

SEQ ID NO: 526 - protein, 23 aa, Artificial Sequence
  Homo_sapiens_P11230_ACHB_HUMAN
MTPGALLMLLGALGAPLAPGVRG

SEQ ID NO: 527 - protein, 23 aa, Artificial Sequence
  Homo_sapiens_O00206_TLR4_HUMAN
MMSASRLAGTLIPAMAFLSCVRP

SEQ ID NO: 528 - protein, 23 aa, Artificial Sequence
  Homo_sapiens_P02461_CO3A1_HUMAN
MMSFVQKGSWLLLALLHPTIILA

SEQ ID NO: 529 - protein, 23 aa, Artificial Sequence
  Homo_sapiens_Q9BQB4_SOST_HUMAN
MQLPLALCLVCLLVHTAFRVVEG

SEQ ID NO: 530 - protein, 23 aa, Artificial Sequence
  Homo_sapiens_P16278_BGAL_HUMAN
MPGFLVRILPLLLVLLLLGPTRG

SEQ ID NO: 531 - protein, 23 aa, Artificial Sequence
  Homo_sapiens_P80108_PHLD_HUMAN
MSAFRLWPGLLIMLGSLCHRGSP

SEQ ID NO: 532 - protein, 24 aa, Artificial Sequence
  Homo_sapiens_P19235_EPOR_HUMAN
MDHLGASLWPQVGSLCLLLAGAAW

SEQ ID NO: 533 - protein, 24 aa, Artificial Sequence
  Homo_sapiens_O95750_FGF19_HUMAN
MRSGCVVVHVWILAGLWLAVAGRP

SEQ ID NO: 534 - protein, 24 aa, Artificial Sequence
  Homo_sapiens_Q6UXB1_IGFL3_HUMAN
MRPRCCILALVCWITVFLLQCSKG

SEQ ID NO: 535 - protein, 24 aa, Artificial Sequence
  Homo_sapiens_P35916_VGFR3_HUMAN
MQRGAALCLRLWLCLGLLDGLVSG

SEQ ID NO: 536 - protein, 24 aa, Artificial Sequence
  Homo_sapiens_Q29865_1C18_HUMAN
MRVMAPRALLLLLSGGLALTETWA

SEQ ID NO: 537 - protein, 24 aa, Artificial Sequence
  Homo_sapiens_P01308_INS_HUMAN
MALWMRLLPLLALLALWGPDPAAA

SEQ ID NO: 538 - protein, 24 aa, Artificial Sequence
  Homo_sapiens_P30495_1B56_HUMAN
MRVTAPRTLLLLLWGALALTETWA

SEQ ID NO: 539 - protein, 24 aa, Artificial Sequence
  Homo_sapiens_P30490_1B52_HUMAN
MRVTAPRTVLLLLWGAVALTETWA

SEQ ID NO: 540 - protein, 24 aa, Artificial Sequence
  Homo_sapiens_P16190_1A33_HUMAN
MAVMAPRTLLLLLLGALALTQTWA

SEQ ID NO: 541 - protein, 24 aa, Artificial Sequence
  Homo_sapiens_Q9UHD0_IL19_HUMAN
MKLQCVSLWLLGTILILCSVDNHG

SEQ ID NO: 542 - protein, 24 aa, Artificial Sequence
  Homo_sapiens_P30504_1C04_HUMAN
MRVMAPRTLILLLSGALALTETWA

SEQ ID NO: 543 - protein, 24 aa, Artificial Sequence
  Homo_sapiens_P30453_1A34_HUMAN
MAIMAPRTLVLLLSGALALTQTWA

SEQ ID NO: 544 - protein, 24 aa, Artificial Sequence
  Homo_sapiens_P30487_1B49_HUMAN
MRVTAPRTVLLLLSAALALTETWA

SEQ ID NO: 545 - protein, 24 aa, Artificial Sequence
  Homo_sapiens_P16471_PRLR_HUMAN
MKENVASATVFTLLLFLNTCLLNG

SEQ ID NO: 546 - protein, 24 aa, Artificial Sequence
  Homo_sapiens_P30447_1A23_HUMAN
MAVMAPRTLVLLLSGALALTQTWA

SEQ ID NO: 547 - protein, 24 aa, Artificial Sequence
  Homo_sapiens_P30499_1C01_HUMAN
MRVMEPRTLILLLSGALALTETWA

SEQ ID NO: 548 - protein, 24 aa, Artificial Sequence
  Homo_sapiens_P01009_A1AT_HUMAN
MPSSVSWGILLLAGLCCLVPVSLA

SEQ ID NO: 549 - protein, 24 aa, Artificial Sequence
  Homo_sapiens_Q9NYY1_IL20_HUMAN
MKASSLAFSLLSAAFYLLWTPSTG

SEQ ID NO: 550 - protein, 24 aa, Artificial Sequence
  Homo_sapiens_P05112_IL4_HUMAN
MGLTSQLLPPLFFLLACAGNFVHG

SEQ ID NO: 551 - protein, 24 aa, Artificial Sequence
  Homo_sapiens_P30466_1B18_HUMAN
MRVTAPRTLLLLLWGAVALTETWA

SEQ ID NO: 552 - protein, 24 aa, Artificial Sequence
  Homo_sapiens_P23515_OMGP_HUMAN
MEYQILKMSLCLFILLFLTPGILC

SEQ ID NO: 553 - protein, 24 aa, Artificial Sequence
  Homo_sapiens_P24387_CRHBP_HUMAN
MSPNFKLQCHFILIFLTALRGESR

SEQ ID NO: 554 - protein, 24 aa, Artificial Sequence
  Homo_sapiens_P04090_REL2_HUMAN
MPRLFFFHLLGVCLLLNQFSRAVA

SEQ ID NO: 555 - protein, 24 aa, Artificial Sequence
  Homo_sapiens_P00533_EGFR_HUMAN
MRPSGTAGAALLALLAALCPASRA

SEQ ID NO: 556 - protein, 24 aa, Artificial Sequence
  Homo_sapiens_Q31610_1B81_HUMAN
MLVMAPRTVLLLLWGAVALTETWA

SEQ ID NO: 557 - protein, 24 aa, Artificial Sequence
  Homo_sapiens_O00626_CCL22_HUMAN
MARLQTALLVVLVLLAVALQATEA

SEQ ID NO: 558 - protein, 24 aa, Artificial Sequence
  Homo_sapiens_P01893_HLAH_HUMAN
MAVMAPRTLLLLLSGALALTQTWA

SEQ ID NO: 559 - protein, 24 aa, Artificial Sequence
  Homo_sapiens_Q15399_TLR1_HUMAN
MTSIFHFAIIFMLILQIRIQLSEE

SEQ ID NO: 560 - protein, 24 aa, Artificial Sequence
  Homo_sapiens_P30101_PDIA3_HUMAN
MRLRRLALFPGVALLLAAARLAAA

SEQ ID NO: 561 - protein, 24 aa, Artificial Sequence
  Homo_sapiens_P06127_CD5_HUMAN
MPMGSLQPLATLYLLGMLVASCLG

SEQ ID NO: 562 - protein, 24 aa, Artificial Sequence
  Homo_sapiens_P19320_VCAM1_HUMAN
MPGKMVVILGASNILWIMFAASQA

SEQ ID NO: 563 - protein, 24 aa, Artificial Sequence
  Homo_sapiens_Q95365_1B38_HUMAN
MLVMAPRTVLLLLSAALALTETWA

SEQ ID NO: 564 - protein, 24 aa, Artificial Sequence
  Homo_sapiens_P30464_1B15_HUMAN
MRVTAPRTVLLLLSGALALTETWA

SEQ ID NO: 565 - protein, 24 aa, Artificial Sequence
  Homo_sapiens_P04180_LCAT_HUMAN
MGPPGSPWQWVTLLLGLLLPPAAP

SEQ ID NO: 566 - protein, 24 aa, Artificial Sequence
  Homo_sapiens_P06729_CD2_HUMAN
MSFPCKFVASFLLIFNVSSKGAVS

SEQ ID NO: 567 - protein, 24 aa, Artificial Sequence
  Homo_sapiens_Q99062_CSF3R_HUMAN
MARLGNCSLTWAALIILLLPGSLE

SEQ ID NO: 568 - protein, 24 aa, Artificial Sequence
  Homo_sapiens_Q96HF1_SFRP2_HUMAN
MLQGPGSLLLLFLASHCCLGSARG

SEQ ID NO: 569 - protein, 24 aa, Artificial Sequence
  Homo_sapiens_P07225_PROS_HUMAN
MRVLGGRCGALLACLLLVLPVSEA

SEQ ID NO: 570 - protein, 24 aa, Artificial Sequence
  Homo_sapiens_P08949_NMB_HUMAN
MARRAGGARMFGSLLLFALLAAGV

SEQ ID NO: 571 - protein, 24 aa, Artificial Sequence
  Homo_sapiens_Q8N441_FGRL1_HUMAN
MTPSPLLLLLLPPLLLGAFPPAAA

SEQ ID NO: 572 - protein, 24 aa, Artificial Sequence
  Homo_sapiens_Q95604_1C17_HUMAN
MRVMAPQALLLLLSGALALIETWA

SEQ ID NO: 573 - protein, 24 aa, Artificial Sequence
  Homo_sapiens_P17643_TYRP1_HUMAN
MSAPKLLSLGCIFFPLLLFQQARA

SEQ ID NO: 574 - protein, 24 aa, Artificial Sequence
  Homo_sapiens_Q09160_1A80_HUMAN
MAVMPPRTLLLLLSGALALTQTWA

SEQ ID NO: 575 - protein, 24 aa, Artificial Sequence
  Homo_sapiens_P30988_CALCR_HUMAN
MRFTFTSRCLALFLLLNHPTPILP

SEQ ID NO: 576 - protein, 24 aa, Artificial Sequence
  Homo_sapiens_P07911_UROM_HUMAN
MGQPSLTWMLMVVVASWFITTAAT

SEQ ID NO: 577 - protein, 24 aa, Artificial Sequence
  Homo_sapiens_P01344_IGF2_HUMAN
MGIPMGKSMLVLLTFLAFASCCIA

SEQ ID NO: 578 - protein, 24 aa, Artificial Sequence
  Homo_sapiens_P30459_1A74_HUMAN
MAVMAPRTLLLLLLGALALTQTRA

SEQ ID NO: 579 - protein, 24 aa, Artificial Sequence
  Homo_sapiens_Q07000_1C15_HUMAN
MRVMAPRTLLLLLSGALALTETWA

SEQ ID NO: 580 - protein, 24 aa, Artificial Sequence
  Homo_sapiens_P53634_CATC_HUMAN
MGAGPSLLLAALLLLLSGDGAVRC

SEQ ID NO: 581 - protein, 24 aa, Artificial Sequence
  Homo_sapiens_P03950_ANGI_HUMAN
MVMGLGVLLLVFVLGLGLTPPTLA

SEQ ID NO: 582 - protein, 24 aa, Artificial Sequence
  Homo_sapiens_Q16674_MIA_HUMAN
MARSLVCLGVIILLSAFSGPGVRG

SEQ ID NO: 583 - protein, 24 aa, Artificial Sequence
  Homo_sapiens_P04155_TFF1_HUMAN
MATMENKVICALVLVSMLALGTLA

SEQ ID NO: 584 - protein, 24 aa, Artificial Sequence
  Homo_sapiens_O60565_GREM1_HUMAN
MSRTAYTVGALLLLLGTLLPAAEG

SEQ ID NO: 585 - protein, 24 aa, Artificial Sequence
  Homo_sapiens_P16188_1A30_HUMAN
MAVMAPRTLLLLLSGALALTHTWA

SEQ ID NO: 586 - protein, 24 aa, Artificial Sequence
  Homo_sapiens_Q8N126_CADM3_HUMAN
MGAPAASLLLLLLLFACCWAPGGA

SEQ ID NO: 587 - protein, 24 aa, Artificial Sequence
  Homo_sapiens_P40967_PME17_HUMAN
MDLVLKRCLLHLAVIGALLAVGAT

SEQ ID NO: 588 - protein, 24 aa, Artificial Sequence
  Homo_sapiens_P78423_X3CL1_HUMAN
MAPISLSWLLRLATFCHLTVLLAG

SEQ ID NO: 589 - protein, 24 aa, Artificial Sequence
  Homo_sapiens_Q7Z5L0_VMO1_HUMAN
MERGAGAKLLPLLLLLRATGFTCA

SEQ ID NO: 590 - protein, 24 aa, Artificial Sequence
  Homo_sapiens_P01215_GLHA_HUMAN
MDYYRKYAAIFLVTLSVFLHVLHS

SEQ ID NO: 591 - protein, 24 aa, Artificial Sequence
  Homo_sapiens_P31358_CD52_HUMAN
MKRFLFLLLTISLLVMVQIQTGLS

SEQ ID NO: 592 - protein, 24 aa, Artificial Sequence
  Homo_sapiens_P61278_SMS_HUMAN
MLSCRLQCALAALSIVLALGCVTG

SEQ ID NO: 593 - protein, 24 aa, Artificial Sequence
  Homo_sapiens_Q6UXH1_CREL2_HUMAN
MRLPRRAALGLLPLLLLLPPAPEA

SEQ ID NO: 594 - protein, 24 aa, Artificial Sequence
  Homo_sapiens_Q9Y4X3_CCL27_HUMAN
MKGPPTFCSLLLLSLLLSPDPTAA

SEQ ID NO: 595 - protein, 24 aa, Artificial Sequence
  Homo_sapiens_Q6UW32_IGFL1_HUMAN
MAPRGCIVAVFAIFCISRLLCSHG

SEQ ID NO: 596 - protein, 24 aa, Artificial Sequence
  Homo_sapiens_Q9GZV9_FGF23_HUMAN
MLGARLRLWVCALCSVCSMSVLRA

SEQ ID NO: 597 - protein, 25 aa, Artificial Sequence
  Homo_sapiens_Q9BZM5_N2DL2_HUMAN
MAAAAATKILLCLPLLLLLSGWSRA

SEQ ID NO: 598 - protein, 25 aa, Artificial Sequence
  Homo_sapiens_Q14641_INSL4_HUMAN
MASLFRSYLPAIWLLLSQLLRESLA

SEQ ID NO: 599 - protein, 25 aa, Artificial Sequence
  Homo_sapiens_P09564_CD7_HUMAN
MAGPPRLLLLPLLLALARGLPGALA

SEQ ID NO: 600 - protein, 25 aa, Artificial Sequence
  Homo_sapiens_P00751_CFAB_HUMAN
MGSNLSPQLCLMPFILGLLSGGVTT

SEQ ID NO: 601 - protein, 25 aa, Artificial Sequence
  Homo_sapiens_P01160_ANF_HUMAN
MSSFSTTTVSFLLLLAFQLLGQTRA

SEQ ID NO: 602 - protein, 25 aa, Artificial Sequence
  Homo_sapiens_P02746_C1QB_HUMAN
MKIPWGSIPVLMLLLLLGLIDISQA

SEQ ID NO: 603 - protein, 25 aa, Artificial Sequence
  Homo_sapiens_P52798_EFNA4_HUMAN
MRLLPLLRTVLWAAFLGSPLRGGSS

SEQ ID NO: 604 - protein, 25 aa, Artificial Sequence
  Homo_sapiens_P03973_SLPI_HUMAN
MKSSGLFPFLVLLALGTLAPWAVEG

SEQ ID NO: 605 - protein, 25 aa, Artificial Sequence
  Homo_sapiens_Q6UWN5_LYPD5_HUMAN
MAMGVPRVILLCLFGAALCLTGSQA

SEQ ID NO: 606 - protein, 25 aa, Artificial Sequence
  Homo_sapiens_Q6WN34_CRDL2_HUMAN
MVPEVRVLSSLLGLALLWFPLDSHA

SEQ ID NO: 607 - protein, 25 aa, Artificial Sequence
  Homo_sapiens_P13987_CD59_HUMAN
MGIQGGSVLFGLLLVLAVFCHSGHS

SEQ ID NO: 608 - protein, 25 aa, Artificial Sequence
  Homo_sapiens_P01730_CD4_HUMAN
MNRGVPFRHLLLVLQLALLPAATQG

SEQ ID NO: 609 - protein, 25 aa, Artificial Sequence
  Homo_sapiens_P13725_ONCM_HUMAN
MGVLLTQRTLLSLVLALLFPSMASM

SEQ ID NO: 610 - protein, 25 aa, Artificial Sequence
  Homo_sapiens_P08833_IBP1_HUMAN
MSEVPVARVWLVLLLLTVQVGVTAG

SEQ ID NO: 611 - protein, 25 aa, Artificial Sequence
  Homo_sapiens_P18510_IL1RA_HUMAN
MEICRGLRSHLITLLLFLFHSETIC

SEQ ID NO: 612 - protein, 25 aa, Artificial Sequence
  Homo_sapiens_Q8WXF3_REL3_HUMAN
MARYMLLLLLAVWVLTGELWPGAEA

SEQ ID NO: 613 - protein, 25 aa, Artificial Sequence
  Homo_sapiens_P12872_MOTI_HUMAN
MVSRKAVAALLVVHVAAMLASQTEA

SEQ ID NO: 614 - protein, 25 aa, Artificial Sequence
  Homo_sapiens_P08572_CO4A2_HUMAN
MGRDQRAVAGPALRRWLLLGTVTVG

SEQ ID NO: 615 - protein, 25 aa, Artificial Sequence
  Homo_sapiens_P24158_PRTN3_HUMAN
MAHRPPSPALASVLLALLLSGAARA

SEQ ID NO: 616 - protein, 25 aa, Artificial Sequence
  Homo_sapiens_Q6UXK5_LRRN1_HUMAN
MARMSFVIAACQLVLGLLMTSLTES

SEQ ID NO: 617 - protein, 25 aa, Artificial Sequence
  Homo_sapiens_P13232_IL7_HUMAN
MFHVSFRYIFGLPPLILVLLPVASS

SEQ ID NO: 618 - protein, 25 aa, Artificial Sequence
  Homo_sapiens_Q9Y5U5_TNR18_HUMAN
MAQHGAMGAFRALCGLALLCALSLG

SEQ ID NO: 619 - protein, 25 aa, Artificial Sequence
  Homo_sapiens_Q969Z4_TR19L_HUMAN
MKPSLLCRPLSCFLMLLPWPLATLT

SEQ ID NO: 620 - protein, 25 aa, Artificial Sequence
  Homo_sapiens_Q8NBI3_CA187_HUMAN
MAGPAIHTAPMLFLVLLLPLELSLA

SEQ ID NO: 621 - protein, 25 aa, Artificial Sequence
  Homo_sapiens_P17813_EGLN_HUMAN
MDRGTLPLAVALLLASCSLSPTSLA

SEQ ID NO: 622 - protein, 25 aa, Artificial Sequence
  Homo_sapiens_P20742_PZP_HUMAN
MRKDRLLHLCLVLLLILLSASDSNS

SEQ ID NO: 623 - protein, 25 aa, Artificial Sequence
  Homo_sapiens_P01270_PTHY_HUMAN
MIPAKDMAKVMIVMLAICFLTKSDG

SEQ ID NO: 624 - protein, 25 aa, Artificial Sequence
  Homo_sapiens_P01903_2DRA_HUMAN
MAISGVPVLGFFIIAVLMSAQESWA

SEQ ID NO: 625 - protein, 25 aa, Artificial Sequence
  Homo_sapiens_Q99944_EGFL8_HUMAN
MGSRAELCTLLGGFSFLLLLIPGEG

SEQ ID NO: 626 - protein, 25 aa, Artificial Sequence
  Homo_sapiens_Q9Y653_GPR56_HUMAN
MTPQSLLQTTLFLLSLLFLVQGAHG

SEQ ID NO: 627 - protein, 25 aa, Artificial Sequence
  Homo_sapiens_P20701_ITAL_HUMAN
MKDSCITVMAMALLSGFFFFAPASS

SEQ ID NO: 628 - protein, 25 aa, Artificial Sequence
  Homo_sapiens_Q9H3T3_SEM6B_HUMAN
MQTPRASPPRPALLLLLLLLGGAHG

SEQ ID NO: 629 - protein, 25 aa, Artificial Sequence
  Homo_sapiens_P12319_FCERA_HUMAN
MAPAMESPTLLCVALLFFAPDGVLA

SEQ ID NO: 630 - protein, 25 aa, Artificial Sequence
  Homo_sapiens_P18428_LBP_HUMAN
MGALARALPSILLALLLTSTPEALG

SEQ ID NO: 631 - protein, 25 aa, Artificial Sequence
  Homo_sapiens_P21583_SCF_HUMAN
MKKTQTWILTCIYLQLLLFNPLVKT

SEQ ID NO: 632 - protein, 26 aa, Artificial Sequence
  Homo_sapiens_Q16270_IBP7_HUMAN
MERPSLRALLLGAAGLLLLLLPLSSS

SEQ ID NO: 633 - protein, 26 aa, Artificial Sequence
  Homo_sapiens_P13224_GP1BB_HUMAN
MGSGPRGALSLLLLLLAPPSRPAAGC

SEQ ID NO: 634 - protein, 26 aa, Artificial Sequence
  Homo_sapiens_Q86YD3_TMM25_HUMAN
MALPPGPAALRHTLLLLPALLSSGWG

SEQ ID NO: 635 - protein, 26 aa, Artificial Sequence
  Homo_sapiens_P17948_VGFR1_HUMAN
MVSYWDTGVLLCALLSCLLLTGSSSG

SEQ ID NO: 636 - protein, 26 aa, Artificial Sequence
  Homo_sapiens_P02654_APOC1_HUMAN
MRLFLSLPVLVVVLSIVLEGPAPAQG

SEQ ID NO: 637 - protein, 26 aa, Artificial Sequence
  Homo_sapiens_P54803_GALC_HUMAN
MTAAAGSAGRAAVPLLLCALLAPGGA

SEQ ID NO: 638 - protein, 26 aa, Artificial Sequence
  Homo_sapiens_O95633_FSTL3_HUMAN
MRPGAPGPLWPLPWGALAWAVGFVSS

SEQ ID NO: 639 - protein, 26 aa, Artificial Sequence
  Homo_sapiens_P12544_GRAA_HUMAN
MRNSYRFLASSLSVVVSLLLIPEDVC

SEQ ID NO: 640 - protein, 26 aa, Artificial Sequence
  Homo_sapiens_P20645_MPRD_HUMAN
MFPFYSCWRTGLLLLLLAVAVRESWQ

SEQ ID NO: 641 - protein, 26 aa, Artificial Sequence
  Homo_sapiens_P16860_ANFB_HUMAN
MDPQTAPSRALLLLLFLHLAFLGGRS

SEQ ID NO: 642 - protein, 26 aa, Artificial Sequence
  Homo_sapiens_P78556_CCL20_HUMAN
MCCTKSLLLAALMSVLLLHLCGESEA

SEQ ID NO: 643 - protein, 26 aa, Artificial Sequence
  Homo_sapiens_P16035_TIMP2_HUMAN
MGAAARTLRLALGLLLLATLLRPADA

SEQ ID NO: 644 - protein, 26 aa, Artificial Sequence
  Homo_sapiens_O95881_TXD12_HUMAN
METRPRLGATCLLGFSFLLLVISSDG

SEQ ID NO: 645 - protein, 26 aa, Artificial Sequence
  Homo_sapiens_P01243_CSH_HUMAN
MAPGSRTSLLLAFALLCLPWLQEAGA

SEQ ID NO: 646 - protein, 26 aa, Artificial Sequence
  Homo_sapiens_P02679_FIBG_HUMAN
MSWSLHPRNLILYFYALLFLSSTCVA

SEQ ID NO: 647 - protein, 26 aa, Artificial Sequence
  Homo_sapiens_Q9UN67_PCDBA_HUMAN
MAVRELCFPRQRQVLFLFLFWGVSLA

SEQ ID NO: 648 - protein, 26 aa, Artificial Sequence
  Homo_sapiens_P14784_IL2RB_HUMAN
MAAPALSWRLPLLILLLPLATSWASA

SEQ ID NO: 649 - protein, 26 aa, Artificial Sequence
  Homo_sapiens_P01189_COLI_HUMAN
MPRSCCSRSGALLLALLLQASMEVRG

SEQ ID NO: 650 - protein, 26 aa, Artificial Sequence
  Homo_sapiens_O00748_EST2_HUMAN
MRLHRLRARLSAVACGLLLLLVRGQG

SEQ ID NO: 651 - protein, 26 aa, Artificial Sequence
  Homo_sapiens_P05997_CO5A2_HUMAN
MMANWAEARPLLILIVLLGQFVSIKA

SEQ ID NO: 652 - protein, 26 aa, Artificial Sequence
  Homo_sapiens_P34059_GALNS_HUMAN
MAAVVAATRWWQLLLVLSAAGMGASG

SEQ ID NO: 653 - protein, 26 aa, Artificial Sequence
  Homo_sapiens_Q9NR61_DLL4_HUMAN
MAAASRSASGWALLLLVALWQQRAAG

SEQ ID NO: 654 - protein, 26 aa, Artificial Sequence
  Homo_sapiens_Q9UNE0_EDAR_HUMAN
MAHVGDCTQTPWLPVLVVSLMCSARA

SEQ ID NO: 655 - protein, 26 aa, Artificial Sequence
  Homo_sapiens_P01242_SOM2_HUMAN
MAAGSRTSLLLAFGLLCLSWLQEGSA

SEQ ID NO: 656 - protein, 26 aa, Artificial Sequence
  Homo_sapiens_O00175_CCL24_HUMAN
MAGLMTIVTSLLFLGVCAHHIIPTGS

SEQ ID NO: 657 - protein, 26 aa, Artificial Sequence
  Homo_sapiens_P20160_CAP7_HUMAN
MTRLTVLALLAGLLASSRAGSSPLLD

SEQ ID NO: 658 - protein, 26 aa, Artificial Sequence
  Homo_sapiens_Q9BZR6_RTN4R_HUMAN
MKRASAGGSRLLAWVLWLQAWQVAAP

SEQ ID NO: 659 - protein, 26 aa, Artificial Sequence
  Homo_sapiens_P13765_2DOB_HUMAN
MGSGWVPWVVALLVNLTRLDSSMTQG

SEQ ID NO: 660 - protein, 26 aa, Artificial Sequence
  Homo_sapiens_Q6UW15_REG3G_HUMAN
MLPPMALPSVSWMLLSCLILLCQVQG

SEQ ID NO: 661 - protein, 26 aa, Artificial Sequence
  Homo_sapiens_P01034_CYTC_HUMAN
MAGPLRAPLLLLAILAVALAVSPAAG

SEQ ID NO: 662 - protein, 26 aa, Artificial Sequence
  Homo_sapiens_O43827_ANGL7_HUMAN
MLKKPLSAVTWLCIFIVAFVSHPAWL

SEQ ID NO: 663 - protein, 26 aa, Artificial Sequence
  Homo_sapiens_Q15782_CH3L2_HUMAN
MGATTMDQKSLWAGVVVLLLLQGGSA

SEQ ID NO: 664 - protein, 26 aa, Artificial Sequence
  Homo_sapiens_Q8N131_PORIM_HUMAN
MGLGARGAWAALLLGTLQVLALLGAA

SEQ ID NO: 665 - protein, 26 aa, Artificial Sequence
  Homo_sapiens_P15692_VEGFA_HUMAN
MNFLLSWVHWSLALLLYLHHAKWSQA

SEQ ID NO: 666 - protein, 26 aa, Artificial Sequence
  Homo_sapiens_P01241_SOMA_HUMAN
MATGSRTSLLLAFGLLCLPWLQEGSA

SEQ ID NO: 667 - protein, 26 aa, Artificial Sequence
  Homo_sapiens_P48551_INAR2_HUMAN
MLLSQNAFIFRSLNLVLMVYISLVFG

SEQ ID NO: 668 - protein, 26 aa, Artificial Sequence
  Homo_sapiens_P21589_5NTD_HUMAN
MCPRAARAPATLLLALGAVLWPAAGA

SEQ ID NO: 669 - protein, 26 aa, Artificial Sequence
  Homo_sapiens_P05408_7B2_HUMAN
MVSRMVSTMLSGLLFWLASGWTPAFA

SEQ ID NO: 670 - protein, 26 aa, Artificial Sequence
  Homo_sapiens_Q9HB40_RISC_HUMAN
MELALRRSPVPRWLLLLPLLLGLNAG

SEQ ID NO: 671 - protein, 27 aa, Artificial Sequence
  Homo_sapiens_Q15768_EFNB3_HUMAN
MGPPHSGPGGVRVGALLLLGVLGLVSG

SEQ ID NO: 672 - protein, 27 aa, Artificial Sequence
  Homo_sapiens_O14791_APOL1_HUMAN
MEGAALLRVSVLCIWMSALFLGVGVRA

SEQ ID NO: 673 - protein, 27 aa, Artificial Sequence
  Homo_sapiens_Q16568_CART_HUMAN
MESSRVRLLPLLGAALLLMLPLLGTRA

SEQ ID NO: 674 - protein, 27 aa, Artificial Sequence
  Homo_sapiens_P98172_EFNB1_HUMAN
MARPGQRWLGKWLVAMVVWALCRLATP

SEQ ID NO: 675 - protein, 27 aa, Artificial Sequence
  Homo_sapiens_P04437_TVA2_HUMAN
MAMLLGASVLILWLQPDWVNSQQKNDD

SEQ ID NO: 676 - protein, 27 aa, Artificial Sequence
  Homo_sapiens_P35858_ALS_HUMAN
MALRKGGLALALLLLSWVALGPRSLEG

SEQ ID NO: 677 - protein, 27 aa, Artificial Sequence
  Homo_sapiens_Q9Y624_JAM1_HUMAN
MGTKAQVERKLLCLFILAILLCSLALG

SEQ ID NO: 678 - protein, 27 aa, Artificial Sequence
  Homo_sapiens_P16144_ITB4_HUMAN
MAGPRPSPWARLLLAALISVSLSGTLA

SEQ ID NO: 679 - protein, 27 aa, Artificial Sequence
  Homo_sapiens_Q9HC23_PROK2_HUMAN
MRSLCCAPLLLLLLLPPLLLTPRAGDA

SEQ ID NO: 680 - protein, 27 aa, Artificial Sequence
  Homo_sapiens_Q9P0W0_IFNK_HUMAN
MSTKPDMIQKCLWLEILMGIFIAGTLS

SEQ ID NO: 681 - protein, 27 aa, Artificial Sequence
  Homo_sapiens_P08697_A2AP_HUMAN
MALLWGLLVLSWSCLQGPCSVFSPVSA

SEQ ID NO: 682 - protein, 27 aa, Artificial Sequence
  Homo_sapiens_P02462_CO4A1_HUMAN
MGPRLSVWLLLLPAALLLHEEHSRAAA

SEQ ID NO: 683 - protein, 27 aa, Artificial Sequence
  Homo_sapiens_P01588_EPO_HUMAN
MGVHECPAWLWLLLSLLSLPLGLPVLG

SEQ ID NO: 684 - protein, 27 aa, Artificial Sequence
  Homo_sapiens_Q6UXB8_PI16_HUMAN
MHGSCSFLMLLLPLLLLLVATTGPVGA

SEQ ID NO: 685 - protein, 27 aa, Artificial Sequence
  Homo_sapiens_Q9BXI9_C1QT6_HUMAN
MGTAALGPVWAALLLFLLMCEIPMVEL

SEQ ID NO: 686 - protein, 27 aa, Artificial Sequence
  Homo_sapiens_P05362_ICAM1_HUMAN
MAPSSPRPALPALLVLLGALFPGPGNA

SEQ ID NO: 687 - protein, 27 aa, Artificial Sequence
  Homo_sapiens_P17936_IBP3_HUMAN
MQRARPTLWAAALTLLVLLRGPPVARA

SEQ ID NO: 688 - protein, 27 aa, Artificial Sequence
  Homo_sapiens_P06858_LIPL_HUMAN
MESKALLVLTLAVWLQSLTASRGGVAA

SEQ ID NO: 689 - protein, 27 aa, Artificial Sequence
  Homo_sapiens_Q7L513_FCRLA_HUMAN
MKLGCVLMAWALYLSLGVLWVAQMLLA

SEQ ID NO: 690 - protein, 27 aa, Artificial Sequence
  Homo_sapiens_Q92643_GPI8_HUMAN
MAVTDSLSRAATVLATVLLLSFGSVAA

SEQ ID NO: 691 - protein, 27 aa, Artificial Sequence
  Homo_sapiens_P04114_APOB_HUMAN
MDPPRPALLALLALPALLLLLLAGARA

SEQ ID NO: 692 - protein, 27 aa, Artificial Sequence
  Homo_sapiens_P06396_GELS_HUMAN
MAPHRPAPALLCALSLALCALSLPVRA

SEQ ID NO: 693 - protein, 27 aa, Artificial Sequence
  Homo_sapiens_P06213_INSR_HUMAN
MGTGGRRGAAAAPLLVAVAALLLGAAG

SEQ ID NO: 694 - protein, 27 aa, Artificial Sequence
  Homo_sapiens_Q5FWE3_PRRT3_HUMAN
MASSPWGCVCGLLLLLLPLLGTGPALG

SEQ ID NO: 695 - protein, 27 aa, Artificial Sequence
  Homo_sapiens_P16284_PECA1_HUMAN
MQPRWAQGATMWLGVLLTLLLCSSLEG

SEQ ID NO: 696 - protein, 27 aa, Artificial Sequence
  Homo_sapiens_Q9NTU7_CBLN4_HUMAN
MGSGRRALSAVPAVLLVLTLPGLPVWA

SEQ ID NO: 697 - protein, 27 aa, Artificial Sequence
  Homo_sapiens_O43291_SPIT2_HUMAN
MAQLCGLRRSRAFLALLGSLLLSGVLA

SEQ ID NO: 698 - protein, 27 aa, Artificial Sequence
  Homo_sapiens_P12724_ECP_HUMAN
MVPKLFTSQICLLLLLGLMGVEGSLHA

SEQ ID NO: 699 - protein, 27 aa, Artificial Sequence
  Homo_sapiens_O60449_LY75_HUMAN
MRTGWATPRRPAGLLMLLFWFFDLAEP

SEQ ID NO: 700 - protein, 27 aa, Artificial Sequence
  Homo_sapiens_P27918_PROP_HUMAN
MITEGAQAPRLLLPPLLLLLTLPATGS

SEQ ID NO: 701 - protein, 27 aa, Artificial Sequence
  Homo_sapiens_P10124_SRGN_HUMAN
MMQKLLKCSRLVLALALILVLESSVQG

SEQ ID NO: 702 - protein, 27 aa, Artificial Sequence
  Homo_sapiens_P10153_RNAS2_HUMAN
MVPKLFTSQICLLLLLGLLAVEGSLHV

SEQ ID NO: 703 - protein, 28 aa, Artificial Sequence
  Homo_sapiens_P19256_LFA3_HUMAN
MVAGSDAGRALGVLSVVCLLHCFGFISC

SEQ ID NO: 704 - protein, 28 aa, Artificial Sequence
  Homo_sapiens_P34096_RNAS4_HUMAN
MALQRTHSLLLLLLLTLLGLGLVQPSYG

SEQ ID NO: 705 - protein, 28 aa, Artificial Sequence
  Homo_sapiens_Q14624_ITIH4_HUMAN
MKPPRPVRTCSKVLVLLSLLAIHQTTTA

SEQ ID NO: 706 - protein, 28 aa, Artificial Sequence
  Homo_sapiens_P20036_HA2Q_HUMAN
MRPEDRMFHIRAVILRALSLAFLLSLRG

SEQ ID NO: 707 - protein, 28 aa, Artificial Sequence
  Homo_sapiens_P18627_LAG3_HUMAN
MWEAQFLGLLFLQPLWVAPVKPLQPGAE

SEQ ID NO: 708 - protein, 28 aa, Artificial Sequence
  Homo_sapiens_P10082_PYY_HUMAN
MVFVRRPWPALTTVLLALLVCLGALVDA

SEQ ID NO: 709 - protein, 28 aa, Artificial Sequence
  Homo_sapiens_P23327_SRCH_HUMAN
MGHHRPWLHASVLWAGVASLLLPPAMTQ

SEQ ID NO: 710 - protein, 28 aa, Artificial Sequence
  Homo_sapiens_P06276_CHLE_HUMAN
MHSKVTIICIRFLFWFLLLCMLIGKSHT

SEQ ID NO: 711 - protein, 28 aa, Artificial Sequence
  Homo_sapiens_P14543_NID1_HUMAN
MLASSSRIRAAWTRALLLPLLLAGPVGC

SEQ ID NO: 712 - protein, 28 aa, Artificial Sequence
  Homo_sapiens_P02747_C1QC_HUMAN
MDVGPSSLPHLGLKLLLLLLLLPLRGQA

SEQ ID NO: 713 - protein, 28 aa, Artificial Sequence
  Homo_sapiens_P13473_LAMP2_HUMAN
MVCFRLFPVPGSGLVLVCLVLGAVRSYA

SEQ ID NO: 714 - protein, 28 aa, Artificial Sequence
  Homo_sapiens_P01303_NPY_HUMAN
MLGNKRLGLSGLTLALSLLVCLGALAEA

SEQ ID NO: 715 - protein, 28 aa, Artificial Sequence
  Homo_sapiens_O94985_CSTN1_HUMAN
MLRRPAPALAPAARLLLAGLLCGGGVWA

SEQ ID NO: 716 - protein, 28 aa, Artificial Sequence
  Homo_sapiens_P11279_LAMP1_HUMAN
MAAPGSARRPLLLLLLLLLLGLMHCASA

SEQ ID NO: 717 - protein, 28 aa, Artificial Sequence
  Homo_sapiens_P08138_TNR16_HUMAN
MGAGATGRAMDGPRLLLLLLLGVSLGGA

SEQ ID NO: 718 - protein, 28 aa, Artificial Sequence
  Homo_sapiens_P10619_PPGB_HUMAN
MIRAAPPPLFLLLLLLLLLVSWASRGEA

SEQ ID NO: 719 - protein, 28 aa, Artificial Sequence
  Homo_sapiens_P12273_PIP_HUMAN
MRLLQLLFRASPATLLLVLCLQLGANKA

SEQ ID NO: 720 - protein, 28 aa, Artificial Sequence
  Homo_sapiens_P10646_TFPI1_HUMAN
MIYTMKKVHALWASVCLLLNLAPAPLNA

SEQ ID NO: 721 - protein, 28 aa, Artificial Sequence
  Homo_sapiens_P14151_LYAM1_HUMAN
MIFPWKCQSTQRDLWNIFKLWGWTMLCC

SEQ ID NO: 722 - protein, 28 aa, Artificial Sequence
  Homo_sapiens_Q5ZPR3_CD276_HUMAN
MLRRRGSPGMGVHVGAALGALWFCLTGA

SEQ ID NO: 723 - protein, 28 aa, Artificial Sequence
  Homo_sapiens_Q13433_S39A6_HUMAN
MARKLSVILILTFALSVTNPLHELKAAA

SEQ ID NO: 724 - protein, 28 aa, Artificial Sequence
  Homo_sapiens_P01236_PRL_HUMAN
MNIKGSPWKGSLLLLLVSNLLLCQSVAP

SEQ ID NO: 725 - protein, 28 aa, Artificial Sequence
  Homo_sapiens_Q9Y2I2_NTNG1_HUMAN
MYLSRFLSIHALWVTVSSVMQPYPLVWG

SEQ ID NO: 726 - protein, 28 aa, Artificial Sequence
  Homo_sapiens_O95998_I18BP_HUMAN
MRHNWTPDLSPLWVLLLCAHVVTLLVRA

SEQ ID NO: 727 - protein, 28 aa, Artificial Sequence
  Homo_sapiens_P07998_RNAS1_HUMAN
MALEKSLVRLLLLVLILLVLGWVQPSLG

SEQ ID NO: 728 - protein, 28 aa, Artificial Sequence
  Homo_sapiens_Q9Y639_NPTN_HUMAN
MSGSSLPSALALSLLLVSGSLLPGPGAA

SEQ ID NO: 729 - protein, 28 aa, Artificial Sequence
  Homo_sapiens_P40259_CD79B_HUMAN
MARLALSPVPSHWMVALLLLLSAEPVPA

SEQ ID NO: 730 - protein, 28 aa, Artificial Sequence
  Homo_sapiens_Q9H4G1_CST9L_HUMAN
MLGLPWKGGLSWALLLLLLGSQILLIYA

SEQ ID NO: 731 - protein, 28 aa, Artificial Sequence
  Homo_sapiens_Q8N6G6_ATL1_HUMAN
MECCRRATPGTLLLFLAFLLLSSRTARS

SEQ ID NO: 732 - protein, 28 aa, Artificial Sequence
  Homo_sapiens_P12259_FA5_HUMAN
MFPGCPRLWVLVVLGTSWVGWGSQGTEA

SEQ ID NO: 733 - protein, 28 aa, Artificial Sequence
  Homo_sapiens_P57087_JAM2_HUMAN
MARRSRHRLLLLLLRYLVVALGYHKAYG

SEQ ID NO: 734 - protein, 28 aa, Artificial Sequence
  Homo_sapiens_Q6UWY5_OLFL1_HUMAN
MMVALRGASALLVLFLAAFLPPPQCTQD

SEQ ID NO: 735 - protein, 28 aa, Artificial Sequence
  Homo_sapiens_Q9NSA1_FGF21_HUMAN
MDSDETGFEHSGLWVSVLAGLLLGACQA

SEQ ID NO: 736 - protein, 29 aa, Artificial Sequence
  Homo_sapiens_P01914_HB2C_HUMAN
MVCLRLPGGSCMAVLTVTLMVLSSPLALA

SEQ ID NO: 737 - protein, 29 aa, Artificial Sequence
  Homo_sapiens_P01298_PAHO_HUMAN
MAAARLCLSLLLLSTCVALLLQPLLGAQG

SEQ ID NO: 738 - protein, 29 aa, Artificial Sequence
  Homo_sapiens_Q96AP7_ESAM_HUMAN
MISLPGPLVTNLLRFLFLGLSALAPPSRA

SEQ ID NO: 739 - protein, 29 aa, Artificial Sequence
  Homo_sapiens_P01137_TGFB1_HUMAN
MPPSGLRLLLLLLPLLWLLVLTPGRPAAG

SEQ ID NO: 740 - protein, 29 aa, Artificial Sequence
  Homo_sapiens_P04278_SHBG_HUMAN
MESRGPLATSRLLLLLLLLLLRHTRQGWA

SEQ ID NO: 741 - protein, 29 aa, Artificial Sequence
  Homo_sapiens_P79483_2B31_HUMAN
MVCLKLPGGSSLAALTVTLMVLSSRLAFA

SEQ ID NO: 742 - protein, 29 aa, Artificial Sequence
  Homo_sapiens_Q9H5V8_CDCP1_HUMAN
MAGLNCGVSIALLGVLLLGAARLPRGAEA

SEQ ID NO: 743 - protein, 29 aa, Artificial Sequence
  Homo_sapiens_Q6UWJ8_C16L2_HUMAN
MEAPGPRALRTALCGGCCCLLLCAQLAVA

SEQ ID NO: 744 - protein, 29 aa, Artificial Sequence
  Homo_sapiens_O00602_FCN1_HUMAN
MELSGATMARGLAVLLVLFLHIKNLPAQA

SEQ ID NO: 745 - protein, 29 aa, Artificial Sequence
  Homo_sapiens_P25189_MYP0_HUMAN
MAPGAPSSSPSPILAVLLFSSLVLSPAQA

SEQ ID NO: 746 - protein, 29 aa, Artificial Sequence
  Homo_sapiens_Q9TQE0_2B19_HUMAN
MVCLKLPGGSCMAALTVTLMVLSSPLALA

SEQ ID NO: 747 - protein, 29 aa, Artificial Sequence
  Homo_sapiens_P13760_2B14_HUMAN
MVCLKFPGGSCMAALTVTLMVLSSPLALA

SEQ ID NO: 748 - protein, 29 aa, Artificial Sequence
  Homo_sapiens_P17301_ITA2_HUMAN
MGPERTGAAPLPLLLVLALSQGILNCCLA

SEQ ID NO: 749 - protein, 29 aa, Artificial Sequence
  Homo_sapiens_P05231_IL6_HUMAN
MNSFSTSAFGPVAFSLGLLLVLPAAFPAP

SEQ ID NO: 750 - protein, 29 aa, Artificial Sequence
  Homo_sapiens_P58499_FAM3B_HUMAN
MRPLAGGLLKVVFVVFASLCAWYSGYLLA

SEQ ID NO: 751 - protein, 29 aa, Artificial Sequence
  Homo_sapiens_O95407_TNR6B_HUMAN
MRALEGPGLSLLCLVLALPALLPVPAVRG

SEQ ID NO: 752 - protein, 29 aa, Artificial Sequence
  Homo_sapiens_P13762_HB2K_HUMAN
MVCLKLPGGSCMAALTVTLTVLSSPLALA

SEQ ID NO: 753 - protein, 29 aa, Artificial Sequence
  Homo_sapiens_Q30154_2B51_HUMAN
MVCLKLPGGSYMAKLTVTLMVLSSPLALA

SEQ ID NO: 754 - protein, 29 aa, Artificial Sequence
  Homo_sapiens_O00478_BT3A3_HUMAN
MKMASSLAFLLLNFHVSLFLVQLLTPCSA

SEQ ID NO: 755 - protein, 29 aa, Artificial Sequence
  Homo_sapiens_Q9UHF4_I20RA_HUMAN
MRAPGRPALRPLPLPPLLLLLLAAPWGRA

SEQ ID NO: 756 - protein, 29 aa, Artificial Sequence
  Homo_sapiens_Q9BS26_TXND4_HUMAN
MHPAVFLSLPDLRCSLLLLVTWVFTPVTT

SEQ ID NO: 757 - protein, 29 aa, Artificial Sequence
  Homo_sapiens_P13763_HB2Q_HUMAN
MMVLQVSAAPRTVALTALLMVLLTSVVQG

SEQ ID NO: 758 - protein, 29 aa, Artificial Sequence
  Homo_sapiens_P12821_ACE_HUMAN
MGAASGRRGPGLLLPLPLLLLLPPQPALA

SEQ ID NO: 759 - protein, 29 aa, Artificial Sequence
  Homo_sapiens_Q9NS68_TNR19_HUMAN
MALKVLLEQEKTFFTLLVLLGYLSCKVTC

SEQ ID NO: 760 - protein, 29 aa, Artificial Sequence
  Homo_sapiens_P23142_FBLN1_HUMAN
MERAAPSRRVPLPLLLLGGLALLAAGVDA

SEQ ID NO: 761 - protein, 29 aa, Artificial Sequence
  Homo_sapiens_P19883_FST_HUMAN
MVRARHQPGGLCLLLLLLCQFMEDRSAQA

SEQ ID NO: 762 - protein, 29 aa, Artificial Sequence
  Homo_sapiens_Q6UXL0_I20RB_HUMAN
MQTFTMVLEEIWTSLFMWFFYALIPCLLT

SEQ ID NO: 763 - protein, 29 aa, Artificial Sequence
  Homo_sapiens_P01911_2B1E_HUMAN
MVCLKLPGGSCMTALTVTLMVLSSPLALS

SEQ ID NO: 764 - protein, 29 aa, Artificial Sequence
  Homo_sapiens_P04229_2B11_HUMAN
MVCLKLPGGSCMTALTVTLMVLSSPLALA

SEQ ID NO: 765 - protein, 30 aa, Artificial Sequence
  Homo_sapiens_P08069_IGF1R_HUMAN
MKSGSGGGSPTSLWGLLFLSAALSLWPTSG

SEQ ID NO: 766 - protein, 30 aa, Artificial Sequence
  Homo_sapiens_P02675_FIBB_HUMAN
MKRMVSWSFHKLKTMKHLLLLLLCVFLVKS

SEQ ID NO: 767 - protein, 30 aa, Artificial Sequence
  Homo_sapiens_Q02246_CNTN2_HUMAN
MGTATRRKPHLLLVAAVALVSSSAWSSALG

SEQ ID NO: 768 - protein, 30 aa, Artificial Sequence
  Homo_sapiens_Q8NBP7_PCSK9_HUMAN
MGTVSSRRSWWPLPLLLLLLLLLGPAGARA

SEQ ID NO: 769 - protein, 30 aa, Artificial Sequence
  Homo_sapiens_P13385_TDGF1_HUMAN
MDCRKMARFSYSVIWIMAISKVFELGLVAG

SEQ ID NO: 770 - protein, 30 aa, Artificial Sequence
  Homo_sapiens_Q14112_NID2_HUMAN
MEGDRVAGRPVLSSLPVLLLLQLLMLRAAA

SEQ ID NO: 771 - protein, 30 aa, Artificial Sequence
  Homo_sapiens_P10720_PF4V_HUMAN
MSSAARSRLTRATRQEMLFLALLLLPVVVA

SEQ ID NO: 772 - protein, 30 aa, Artificial Sequence
  Homo_sapiens_P06756_ITAV_HUMAN
MAFPPRRRLRLGPRGLPLLLSGLLLPLCRA

SEQ ID NO: 773 - protein, 30 aa, Artificial Sequence
  Homo_sapiens_P49257_LMAN1_HUMAN
MAGSRQRGLRARVRPLFCALLLSLGRFVRG

SEQ ID NO: 774 - protein, 30 aa, Artificial Sequence
  Homo_sapiens_Q9BWV1_BOC_HUMAN
MLRGTMTAWRGMRPEVTLACLLLATAGCFA

SEQ ID NO: 775 - protein, 30 aa, Artificial Sequence
  Homo_sapiens_Q96I82_KAZD1_HUMAN
MLPPPRPAAALALPVLLLLLVVLTPPPTGA

SEQ ID NO: 776 - protein, 30 aa, Artificial Sequence
  Homo_sapiens_Q6UW56_APR3_HUMAN
MAPHGPGSLTTLVPWAAALLLALGVERALA

SEQ ID NO: 777 - protein, 30 aa, Artificial Sequence
  Homo_sapiens_P11117_PPAL_HUMAN
MAGKRSGWSRAALLQLLLGVNLVVMPPTRA

SEQ ID NO: 778 - protein, 30 aa, Artificial Sequence
  Homo_sapiens_Q96CG8_CTHR1_HUMAN
MRPQGPAASPQRLRGLLLLLLLQLPAPSSA

SEQ ID NO: 779 - protein, 30 aa, Artificial Sequence
  Homo_sapiens_Q96BY9_TMM66_HUMAN
MAAACGPGAAGYCLLLGLHLFLLTAGPALG

SEQ ID NO: 780 - protein, 31 aa, Artificial Sequence
  Homo_sapiens_Q6UWV2_MPZL3_HUMAN
MQQRGAAGSRGCALFPLLGVLFFQGVYIVFS

SEQ ID NO: 781 - protein, 31 aa, Artificial Sequence
  Homo_sapiens_P21781_FGF7_HUMAN
MHKWILTWILPTLLYRSCFHIICLVGTISLA

SEQ ID NO: 782 - protein, 31 aa, Artificial Sequence
  Homo_sapiens_P08514_ITA2B_HUMAN
MARALCPLQALWLLEWVLLLLGPCAAPPAWA

SEQ ID NO: 783 - protein, 31 aa, Artificial Sequence
  Homo_sapiens_P48745_NOV_HUMAN
MQSVQSTSFCLRKQCLCLTFLLLHLLGQVAA

SEQ ID NO: 784 - protein, 31 aa, Artificial Sequence
  Homo_sapiens_Q8N474_SFRP1_HUMAN
MGIGRSEGGRRGAALGVLLALGAALLAVGSA

SEQ ID NO: 785 - protein, 31 aa, Artificial Sequence
  Homo_sapiens_O15197_EPHB6_HUMAN
MATEGAAQLGNRVAGMVCSLWVLLLVSSVLA

SEQ ID NO: 786 - protein, 31 aa, Artificial Sequence
  Homo_sapiens_P06280_AGAL_HUMAN
MQLRNPELHLGCALALRFLALVSWDIPGARA

SEQ ID NO: 787 - protein, 31 aa, Artificial Sequence
  Homo_sapiens_Q16620_NTRK2_HUMAN
MSSWIRWHGPAMARLWGFCWLVVGFWRAAFA

SEQ ID NO: 788 - protein, 31 aa, Artificial Sequence
  Homo_sapiens_P14210_HGF_HUMAN
MWVTKLLPALLLQHVLLHLLLLPIAIPYAEG

SEQ ID NO: 789 - protein, 31 aa, Artificial Sequence
  Homo_sapiens_P17213_BPI_HUMAN
MRENMARGPCNAPRWASLMVLVAIGTAVTAA

SEQ ID NO: 790 - protein, 31 aa, Artificial Sequence
  Homo_sapiens_O94907_DKK1_HUMAN
MMALGAAGATRVFVAMVAAALGGHPLLGVSA

SEQ ID NO: 791 - protein, 31 aa, Artificial Sequence
  Homo_sapiens_P28906_CD34_HUMAN
MLVRRGARAGPRMPRGWTALCLLSLLPSGFM

SEQ ID NO: 792 - protein, 31 aa, Artificial Sequence
  Homo_sapiens_Q9BX67_JAM3_HUMAN
MALRRPPRLRLCARLPDFFLLLLFRGCLIGA

SEQ ID NO: 793 - protein, 31 aa, Artificial Sequence
  Homo_sapiens_P50895_LU_HUMAN
MEPPDAPAQARGAPRLLLLAVLLAAHPDAQA

SEQ ID NO: 794 - protein, 31 aa, Artificial Sequence
  Homo_sapiens_O60609_GFRA3_HUMAN
MVRPLNPRPLPPVVLMLLLLLPPSPLPLAAG

SEQ ID NO: 795 - protein, 31 aa, Artificial Sequence
  Homo_sapiens_P02751_FINC_HUMAN
MLRGPGPGLLLLAVQCLGTAVPSTGASKSKR

SEQ ID NO: 796 - protein, 31 aa, Artificial Sequence
  Homo_sapiens_P02776_PLF4_HUMAN
MSSAAGFCASRPGLLFLGLLLLPLVVAFASA

SEQ ID NO: 797 - protein, 31 aa, Artificial Sequence
  Homo_sapiens_O75629_CREG1_HUMAN
MAGLSRGSARALLAALLASTLLALLVSPARG

SEQ ID NO: 798 - protein, 31 aa, Artificial Sequence
  Homo_sapiens_Q16288_NTRK3_HUMAN
MDVSLCPAKCSFWRIFLLGSVWLDYVGSVLA

SEQ ID NO: 799 - protein, 31 aa, Artificial Sequence
  Homo_sapiens_P49767_VEGFC_HUMAN
MHLLGFFSVACSLLAAALLPGPREAPAAAAA

SEQ ID NO: 800 - protein, 32 aa, Artificial Sequence
  Homo_sapiens_P05538_HB2X_HUMAN
MSWKMALQIPGGFWAAAVTVMLVMLSTPVAEA

SEQ ID NO: 801 - protein, 32 aa, Artificial Sequence
  Homo_sapiens_Q92765_SFRP3_HUMAN
MVCGSPGGMLLLRAGLLALAALCLLRVPGARA

SEQ ID NO: 802 - protein, 32 aa, Artificial Sequence
  Homo_sapiens_Q9H293_IL25_HUMAN
MRERPRLGEDSSLISLFLQVVAFLAMVMGTHT

SEQ ID NO: 803 - protein, 32 aa, Artificial Sequence
  Homo_sapiens_P01008_ANT3_HUMAN
MYSNVIGTVTSGKRKVYLLSLLLIGFWDCVTC

SEQ ID NO: 804 - protein, 32 aa, Artificial Sequence
  Homo_sapiens_P04070_PROC_HUMAN
MWQLTSLLLFVATWGISGTPAPLDSVFSSSER

SEQ ID NO: 805 - protein, 32 aa, Artificial Sequence
  Homo_sapiens_P11912_CD79A_HUMAN
MPGGPGVLQALPATIFLLFLLSAVYLGPGCQA

SEQ ID NO: 806 - protein, 32 aa, Artificial Sequence
  Homo_sapiens_P01918_HB21_HUMAN
MSWKKALRIPGGLRAATVTLMLSMLSTPVAEG

SEQ ID NO: 807 - protein, 32 aa, Artificial Sequence
  Homo_sapiens_P13726_TF_HUMAN
METPAWPRVPRPETAVARTLLLGWVFAQVAGA

SEQ ID NO: 808 - protein, 32 aa, Artificial Sequence
  Homo_sapiens_Q9H7M9_GI24_HUMAN
MGVPTALEAGSWRWGSLLFALFLAASLGPVAA

SEQ ID NO: 809 - protein, 32 aa, Artificial Sequence
  Homo_sapiens_Q96F46_I17RA_HUMAN
MGAARSPPSAVPGPLLGLLLLLLGVLAPGGAS

SEQ ID NO: 810 - protein, 32 aa, Artificial Sequence
  Homo_sapiens_P01919_HB22_HUMAN
MSWKKSLRIPGDLRVATVTLMLAILSSSLAEG

SEQ ID NO: 811 - protein, 32 aa, Artificial Sequence
  Homo_sapiens_P01920_HB24_HUMAN
MSWKKALRIPGGLRVATVTLMLAMLSTPVAEG

SEQ ID NO: 812 - protein, 32 aa, Artificial Sequence
  Homo_sapiens_P03992_HB25_HUMAN
MSWKKALRIPGDLRVATVTLMLAMLSSLLAEG

SEQ ID NO: 813 - protein, 32 aa, Artificial Sequence
  Homo_sapiens_P15309_PPAP_HUMAN
MRAAPLLLARAASLSLGFLFLLFFWLDRSVLA

SEQ ID NO: 814 - protein, 32 aa, Artificial Sequence
  Homo_sapiens_P09603_CSF1_HUMAN
MTAPGAAGRCPPTTWLGSLLLLVCLLASRSIT

SEQ ID NO: 815 - protein, 32 aa, Artificial Sequence
  Homo_sapiens_Q9NPH0_PPA6_HUMAN
MITGVFSMRLWTPVGVLTSLAYCLHQRRVALA

SEQ ID NO: 816 - protein, 32 aa, Artificial Sequence
  Homo_sapiens_Q6UW01_CBLN3_HUMAN
MLGAKPHWLPGPLHSPGLPLVLVLLALGAGWA

SEQ ID NO: 817 - protein, 32 aa, Artificial Sequence
  Homo_sapiens_P26006_ITA3_HUMAN
MGPGPSRAPRAPRLMLCALALMVAAGGCVVSA

SEQ ID NO: 818 - protein, 32 aa, Artificial Sequence
  Homo_sapiens_P30040_ERP29_HUMAN
MAAAVPRAAFLSPLLPLLLGFLLLSAPHGGSG

SEQ ID NO: 819 - protein, 32 aa, Artificial Sequence
  Homo_sapiens_P21246_PTN_HUMAN
MQAQQYQQQRRKFAAAFLAFIFILAAVDTAEA

SEQ ID NO: 820 - protein, 32 aa, Artificial Sequence
  Homo_sapiens_P09619_PGFRB_HUMAN
MRLPGAMPALALKGELLLLSLLLLLEPQISQG

SEQ ID NO: 821 - protein, 32 aa, Artificial Sequence
  Homo_sapiens_P16066_ANPRA_HUMAN
MPGPRRPAGSRLRLLLLLLLPPLLLLLRGSHA

SEQ ID NO: 822 - protein, 32 aa, Artificial Sequence
  Homo_sapiens_P05537_HB23_HUMAN
MSWKKALRIPGGLRVATVTLMLAMLSTSVAEG

SEQ ID NO: 823 - protein, 33 aa, Artificial Sequence
  Homo_sapiens_P13612_ITA4_HUMAN
MAWEARREPGPRRAAVRETVMLLLCLGVPTGRP

SEQ ID NO: 824 - protein, 33 aa, Artificial Sequence
  Homo_sapiens_P01019_ANGT_HUMAN
MRKRAPQSEMAPAGVSLRATILCLLAWAGLAAG

SEQ ID NO: 825 - protein, 33 aa, Artificial Sequence
  Homo_sapiens_Q9NQ34_TMM9B_HUMAN
MATLWGGLLRLGSLLSLSCLALSVLLLAQLSDA

SEQ ID NO: 826 - protein, 33 aa, Artificial Sequence
  Homo_sapiens_Q13683_ITA7_HUMAN
MAGARSRDPWGASGICYLFGSLLVELLFSRAVA

SEQ ID NO: 827 - protein, 33 aa, Artificial Sequence
  Homo_sapiens_P23284_PPIB_HUMAN
MLRLSERNMKVLLAAALIAGSVFFLLLPGPSAA

SEQ ID NO: 828 - protein, 33 aa, Artificial Sequence
  Homo_sapiens_Q9GZX6_IL22_HUMAN
MAALQKSVSSFLMGTLATSCLLLLALLVQGGAA

SEQ ID NO: 829 - protein, 33 aa, Artificial Sequence
  Homo_sapiens_Q9P121_NTRI_HUMAN
MGVCGYLFLPWKCLVVVSLRLLFLVPTGVPVRS

SEQ ID NO: 830 - protein, 33 aa, Artificial Sequence
  Homo_sapiens_P11047_LAMC1_HUMAN
MRGSHRAAPALRPRGRLWPVLAVLAAAAAAGCA

SEQ ID NO: 831 - protein, 33 aa, Artificial Sequence
  Homo_sapiens_Q8NCC3_LYPA3_HUMAN
MGLHLRPYRVGLLPDGLLFLLLLLMLLADPALP

SEQ ID NO: 832 - protein, 33 aa, Artificial Sequence
  Homo_sapiens_P12318_FCG2A_HUMAN
MTMETQMSQNVCPRNLWLLQPLTVLLLLASADS

SEQ ID NO: 833 - protein, 33 aa, Artificial Sequence
  Homo_sapiens_Q6UWI4_SHSA2_HUMAN
MWGARRSSVSSSWNAASLLQLLLAALLAAGARA

SEQ ID NO: 834 - protein, 33 aa, Artificial Sequence
  Homo_sapiens_Q8NBK3_SUMF1_HUMAN
MAAPALGLVCGRCPELGLVLLLLLLSLLCGAAG

SEQ ID NO: 835 - protein, 34 aa, Artificial Sequence
  Homo_sapiens_P40199_CEAM6_HUMAN
MGPPSAPPCRLHVPWKEVLLTASLLTFWNPPTTA

SEQ ID NO: 836 - protein, 34 aa, Artificial Sequence
  Homo_sapiens_P02775_CXCL7_HUMAN
MSLRLDTTPSCNSARPLHALQVLLLLSLLLTALA

SEQ ID NO: 837 - protein, 34 aa, Artificial Sequence
  Homo_sapiens_P15529_MCP_HUMAN
MEPPGRRECPFPSWRFPGLLLAAMVLLLYSFSDA

SEQ ID NO: 838 - protein, 34 aa, Artificial Sequence
  Homo_sapiens_P11464_PSG1_HUMAN
MGTLSAPPCTQRIKWKGLLLTASLLNFWNLPTTA

SEQ ID NO: 839 - protein, 34 aa, Artificial Sequence
  Homo_sapiens_P09341_GROA_HUMAN
MARAALSAAPSNPRLLRVALLLLLLVAAGRRAAG

SEQ ID NO: 840 - protein, 34 aa, Artificial Sequence
  Homo_sapiens_P31997_CEAM8_HUMAN
MGPISAPSCRWRIPWQGLLLTASLFTFWNPPTTA

SEQ ID NO: 841 - protein, 34 aa, Artificial Sequence
  Homo_sapiens_P19875_CXCL2_HUMAN
MARATLSAAPSNPRLLRVALLLLLLVAASRRAAG

SEQ ID NO: 842 - protein, 34 aa, Artificial Sequence
  Homo_sapiens_Q9NZV1_CRIM1_HUMAN
MYLVAGDRGLAGCGHLLVSLLGLLLLLARSGTRA

SEQ ID NO: 843 - protein, 34 aa, Artificial Sequence
  Homo_sapiens_P08174_DAF_HUMAN
MTVARPSVPAALPLLGELPRLLLLVLLCLPAVWG

SEQ ID NO: 844 - protein, 34 aa, Artificial Sequence
  Homo_sapiens_P33681_CD80_HUMAN
MGHTRRQGTSPSKCPYLNFFQLLVLAGLSHFCSG

SEQ ID NO: 845 - protein, 34 aa, Artificial Sequence
  Homo_sapiens_P19876_CXCL3_HUMAN
MAHATLSAAPSNPRLLRVALLLLLLVAASRRAAG

SEQ ID NO: 846 - protein, 34 aa, Artificial Sequence
  Homo_sapiens_P01374_TNFB_HUMAN
MTPPERLFLPRVCGTTLHLLLLGLLLVLLPGAQG

SEQ ID NO: 847 - protein, 34 aa, Artificial Sequence
  Homo_sapiens_P11465_PSG2_HUMAN
MGPLSAPPCTEHIKWKGLLVTASLLNFWNLPTTA

SEQ ID NO: 848 - protein, 34 aa, Artificial Sequence
  Homo_sapiens_P06731_CEAM5_HUMAN
MESPSAPPHRWCIPWQRLLLTASLLTFWNPPTTA

SEQ ID NO: 849 - protein, 34 aa, Artificial Sequence
  Homo_sapiens_P13688_CEAM1_HUMAN
MGHLSAPLHRVRVPWQGLLLTASLLTFWNPPTTA

SEQ ID NO: 850 - protein, 35 aa, Artificial Sequence
  Homo_sapiens_O43278_SPIT1_HUMAN
MAPARTMARARLAPAGIPAVALWLLCTLGLQGTQA

SEQ ID NO: 851 - protein, 35 aa, Artificial Sequence
  Homo_sapiens_Q04756_HGFA_HUMAN
MGRWAWVPSPWPPPGLGPFLLLLLLLLLLPRGFQP

SEQ ID NO: 852 - protein, 35 aa, Artificial Sequence
  Homo_sapiens_Q14002_CEAM7_HUMAN
MGSPSACPYRVCIPWQGLLLTASLLTFWNLPNSAQ

SEQ ID NO: 853 - protein, 35 aa, Artificial Sequence
  Homo_sapiens_P02750_A2GL_HUMAN
MSSWSRQRPKSPGGIQPHVSRTLFLLLLLAASAWG

SEQ ID NO: 854 - protein, 35 aa, Artificial Sequence
  Homo_sapiens_O43155_FLRT2_HUMAN
MGLQTTKWPSHGAFFLKSWLIISLGLYSQVSKLLA

SEQ ID NO: 855 - protein, 35 aa, Artificial Sequence
  Homo_sapiens_Q9NPF0_CD320_HUMAN
MSGGWMAQVGAWRTGALGLALLLLLGLGLGLEAAA

SEQ ID NO: 856 - protein, 35 aa, Artificial Sequence
  Homo_sapiens_Q9Y251_HPSE_HUMAN
MLLRSKPALPPPLMLLLLGPLGPLSPGALPRPAQA

SEQ ID NO: 857 - protein, 36 aa, Artificial Sequence
  Homo_sapiens_Q13421_MSLN_HUMAN
MALPTARPLLGSCGTPALGSLLFLLFSLGWVQPSRT

SEQ ID NO: 858 - protein, 36 aa, Artificial Sequence
  Homo_sapiens_P42830_CXCL5_HUMAN
MSLLSSRAARVPGPSSSLCALLVLLLLLTQPGPIAS

SEQ ID NO: 859 - protein, 36 aa, Artificial Sequence
  Homo_sapiens_P15586_GNS_HUMAN
MRLLPLAPGRLRRGSPRHLPSCSPALLLLVLGGCLG

SEQ ID NO: 860 - protein, 37 aa, Artificial Sequence
  Homo_sapiens_Q16790_CAH9_HUMAN
MAPLCPSPWLPLLIPAPAPGLTVQLLLSLLLLVPVHP

SEQ ID NO: 861 - protein, 37 aa, Artificial Sequence
  Homo_sapiens_O75462_CRLF1_HUMAN
MPAGRRGPAAQSARRPPPLLPLLLLLCVLGAPRAGSG

SEQ ID NO: 862 - protein, 37 aa, Artificial Sequence
  Homo_sapiens_P80162_CXCL6_HUMAN
MSLPSSRAARVPGPSGSLCALLALLLLLTPPGPLASA

SEQ ID NO: 863 - protein, 37 aa, Artificial Sequence
  Homo_sapiens_Q86WA6_BPHL_HUMAN
MVAVLGGRGVLRLRLLLSALKPGIHVPRAGPAAAFGT

SEQ ID NO: 864 - protein, 37 aa, Artificial Sequence
  Homo_sapiens_Q9BX74_TM2D1_HUMAN
MAAAWPSGPSAPEAVTARLVGVLWFVSVTTGPWGAVA

SEQ ID NO: 865 - protein, 38 aa, Artificial Sequence
  Homo_sapiens_Q05996_ZP2_HUMAN
MACRQRGGSWSPSGWFNAGWSTYRSISLFFALVTSGNS

SEQ ID NO: 866 - protein, 38 aa, Artificial Sequence
  Homo_sapiens_Q92956_TNR14_HUMAN
MEPPGDWGPPPWRSTPKTDVLRLVLYLTFLGAPCYAPA

SEQ ID NO: 867 - protein, 38 aa, Artificial Sequence
  Homo_sapiens_Q9NPR2_SEM4B_HUMAN
MGLRSWLAAPWGALPPRPPLLLLLLLLLLLQPPPPTWA

SEQ ID NO: 868 - protein, 39 aa, Artificial Sequence
  Homo_sapiens_P18065_IBP2_HUMAN
MLPRVGCPALPLPPPPLLPLLPLLLLLLGASGGGGGARA

SEQ ID NO: 869 - protein, 39 aa, Artificial Sequence
  Homo_sapiens_P04062_GLCM_HUMAN
MEFSSPSREECPKPLSRVSIMAGSLTGLLLLQAVSWASG

SEQ ID NO: 870 - protein, 40 aa, Artificial Sequence
  Homo_sapiens_Q9UIK5_TEFF2_HUMAN
MVLWESPRQCSSWTLCEGFCWLLLLPVMLLIVARPVKLAA

SEQ ID NO: 871 - protein, 40 aa, Artificial Sequence
  Homo_sapiens_Q9NR16_C163B_HUMAN
MMLPQNSWHIDFGRCCCHQNLFSAVVTCILLLNSCFLISS

SEQ ID NO: 872 - protein, 40 aa, Artificial Sequence
  Homo_sapiens_P11717_MPRI_HUMAN
MGAAAGRSPHLGPAPARRPQRSLLLLQLLLLVAAPGSTQA

SEQ ID NO: 873 - protein, 41 aa, Artificial Sequence
  Homo_sapiens_P17927_CR1_HUMAN
MGASSPRSPEPVGPPAPGLPFCCGGSLLAVVVLLALPVAWG

SEQ ID NO: 874 - protein, 41 aa, Artificial Sequence
  Homo_sapiens_P08648_ITA5_HUMAN
MGSRTPESPLHAVQLRWGPRRRPPLLPLLLLLLPPPPRVGG

SEQ ID NO: 875 - protein, 41 aa, Artificial Sequence
  Homo_sapiens_P16109_LYAM3_HUMAN
MANCQIAILYQRFQRVVFGISQLLCFSALISELTNQKEVAA

SEQ ID NO: 876 - protein, 41 aa, Artificial Sequence
  Homo_sapiens_Q8NHP8_PLBL2_HUMAN
MVGQMYCYPGSHLARALTRALALALVLALLVGPFLSGLAGA

SEQ ID NO: 877 - protein, 41 aa, Artificial Sequence
  Homo_sapiens_Q8N0W4_NLGNX_HUMAN
MSRPQGLLWLPLLFTPVCVMLNSNVLLWLTALAIKFTLIDS

SEQ ID NO: 878 - protein, 46 aa, Artificial Sequence
  Homo_sapiens_P17405_ASM_HUMAN
MPRYGASLRQSCPRSGREQGQDGTAGAPGLLWMGLVLALALALALA

SEQ ID NO: 879 - protein, 47 aa, Artificial Sequence
  Homo_sapiens_Q6ZSA7_LRC55_HUMAN
MGSLQHCCCLLPKMGDTWAQLPWPGPPHPAMLLISLLLAAGLMHSDA

SEQ ID NO: 880 - protein, 47 aa, Artificial Sequence
  Homo_sapiens_Q99519_NEUR1_HUMAN
MTGERPSTALPDRRWGPRILGFWGGCRVWVFAAIFLLLSLAASWSKA

SEQ ID NO: 881 - protein, 48 aa, Artificial Sequence
  Homo_sapiens_P04003_C4BPA_HUMAN
MHPPKTPSGALHRKRKMAAWPFSRLWKVSDPILFQMTLIAALLPAVLG

SEQ ID NO: 882 - protein, 48 aa, Artificial Sequence
  Homo_sapiens_P05164_PERM_HUMAN
MGVPFFSSLRCMVDLGPCWAGGLTAEMKLLLALAGLLAILATPQPSEG

SEQ ID NO: 883 - protein, 49 aa, Artificial Sequence
  Homo_sapiens_O00754_MA2B1_HUMAN
MGAYARASGVCARGCLDSAGPWTMSRALRPPLPPLCFFLLLLAAAGARA

SEQ ID NO: 884 - protein, 51 aa, Artificial Sequence
  Homo_sapiens_Q13007_IL24_HUMAN
MNFQQRLQSLWTLARPFCPPLLATASQMQMVVLPCLGFTLLLWSQVSGAQG

SEQ ID NO: 885 - protein, 55 aa, Artificial Sequence
  Homo_sapiens_O14763_TR10B_HUMAN
MEQRGQNAPAASGARKRHGPGPREARGARPGPRVPKTLVLVVAAVLLLVSAESAL

SEQ ID NO: 886 - protein, 55 aa, Artificial Sequence
  Homo_sapiens_Q9UBN6_TR10D_HUMAN
MGLWGQSVPTASSARAGRYPGARTASGTRPWLLDPKILKFVVFIVAVLLPVRVDS

SEQ ID NO: 887 - protein, 16 aa, Artificial Sequence
  Human_adenovirus_A_serotype_12_P36707_E3B14_ADE12
MKTALVLFFMLIPVWA

SEQ ID NO: 888 - protein, 19 aa, Artificial Sequence
  Human_adenovirus_B_serotype_11_(strain_BC34)_P35771_E3GL_ADE1A
MGPILVLLVLLSLLEAGSA

SEQ ID NO: 889 - protein, 19 aa, Artificial Sequence
  Human_adenovirus_B_serotype_11_(strain_Slobiski)_P68980_E3GL_ADE1 P
MGPILVLLVLLSLLEPGSA

SEQ ID NO: 890 - protein, 21 aa, Artificial Sequence
  Human_adenovirus_B_serotype_3_P11316_E3B14_ADE03
MQAMLPVILILLLPCIPLAST

SEQ ID NO: 891 - protein, 19 aa, Artificial Sequence
  Human_adenovirus_B_serotype_3_P11323_E3GL_ADE03
MGAILVVLALLSLLGLGSA

SEQ ID NO: 892 - protein, 19 aa, Artificial Sequence
  Human_adenovirus_B_serotype_7_P15136_E3B14_ADE07
MQAMLPVILILLLPCIALA

SEQ ID NO: 893 - protein, 21 aa, Artificial Sequence
  Human_coronavirus_229E_P19739_NS4A_CVH22
MALGLFTLQLVSAVNQSLSNA

SEQ ID NO: 894 - protein, 13 aa, Artificial Sequence
  Human_coronavirus_HKU1_(isolate_N1)_Q5MQD0_SPIKE_CVHN1
MLLIIFILPTTLA

SEQ ID NO: 895 - protein, 13 aa, Artificial Sequence
  Human_coronavirus_HKU1_(isolate_N1)_Q5MQD1_HEMA_CVHN1
MLIIFLFFYFCYG

SEQ ID NO: 896 - protein, 13 aa, Artificial Sequence
  Human_coronavirus_HKU1_(isolate_N2)_Q14EB0_SPIKE_CVHN2
MFLIIFILPTTLA

SEQ ID NO: 897 - protein, 13 aa, Artificial Sequence
  Human_coronavirus_HKU1_(isolate_N2)_Q14EB1_HEMA_CVHN2
MLIIFLFFNFCYG

SEQ ID NO: 898 - protein, 15 aa, Artificial Sequence
  Human_coronavirus_NL63_Q06Y10_Q06Y10_CVHNL
MKLFLILLILPLVSC

SEQ ID NO: 899 - protein, 15 aa, Artificial Sequence
  Human_coronavirus_NL63_Q6Q1S2_SPIKE_CVHNL
MKLFLILLVLPLASC

SEQ ID NO: 900 - protein, 14 aa, Artificial Sequence
  Human_coronavirus_OC43_P36334_SPIKE_CVHOC
MFLILLISLPTAFA

SEQ ID NO: 901 - protein, 25 aa, Artificial Sequence
  Human_cytomegalovirus_O56822_O56822_HCMV
MLLRYIIFHREKVLYLTAACMFGIY

SEQ ID NO: 902 - protein, 30 aa, Artificial Sequence
  Human_cytomegalovirus_(strain_1042)_Q68668_GL_HCMV2
MCRRPDCGFSFSPGPVILLWCCLLLSIVSS

SEQ ID NO: 903 - protein, 30 aa, Artificial Sequence
  Human_cytomegalovirus_(strain_2387)_Q68669_GL_HCMV3
MCRRPDCGFSFSPGPVVLLWCCLLLPIVSS

SEQ ID NO: 904 - protein, 30 aa, Artificial Sequence
  Human_cytomegalovirus_(strain_4654)_Q68670_GL_HCMV4
MCRRPDCGFSFSPGPVILLWCCLLLPIVSS

SEQ ID NO: 905 - protein, 25 aa, Artificial Sequence
  Human_cytomegalovirus_(strain_AD169)_P16808_IR10_HCMVA
MYPRVMHAVCFLALSLVSYVAVCAE

SEQ ID NO: 906 - protein, 19 aa, Artificial Sequence
  Human_cytomegalovirus_(strain_AD169)_P17150_IL10H_HCMVA
MLSVMVSSSLVLIVFFLGA

SEQ ID NO: 907 - protein, 23 aa, Artificial Sequence
  Human_cytomegalovirus_(strain_AD169)_P16756_UL14_HCMVA
MGGGRLPPLWLPLLIAWSEWGNC

SEQ ID NO: 908 - protein, 19 aa, Artificial Sequence
  Human_cytomegalovirus_(strain_AD169)_P16745_UL09_HCMVA
MYRYTWLLWWITILLRIQQ

SEQ ID NO: 909 - protein, 30 aa, Artificial Sequence
  Human_cytomegalovirus_(strain_AD169)_P16750_GO_HCMVA
MGRKEMMVRDVPKMVFLISISFLLVSFINC

SEQ ID NO: 910 - protein, 20 aa, Artificial Sequence
  Human_cytomegalovirus_(strain_AD169)_P16845_UL22A_HCMVA
MARRLWILSLLAVTLTVALA

SEQ ID NO: 911 - protein, 24 aa, Artificial Sequence
  Human_cytomegalovirus_(strain_AD169)_P06473_VGLB_HCMVA
MESRIWCLVVCVNLCIVCLGAAVS

SEQ ID NO: 912 - protein, 23 aa, Artificial Sequence
  Human_cytomegalovirus_(strain_AD169)_P12824_GH_HCMVA
MRPGLPPYLTVFTVYLLSHLPSQ

SEQ ID NO: 913 - protein, 26 aa, Artificial Sequence
  Human_cytomegalovirus_(strain_AD169)_P16757_UL16P_HCMVA
MERRRGTVPLGWVFFVLCLSASSSCA

SEQ ID NO: 914 - protein, 25 aa, Artificial Sequence
  Human_cytomegalovirus_(strain_AD169)_P16740_UL120_HCMVA
MYRAGVTLLVVAVVSLGRWDVVTMA

SEQ ID NO: 915 - protein, 21 aa, Artificial Sequence
  Human_cytomegalovirus_(strain_AD169)_P16795_GN_HCMVA
MEWNTLVLGLLVLSVVAESSG

SEQ ID NO: 916 - protein, 23 aa, Artificial Sequence
  Human_cytomegalovirus_(strain_AD169)_P16739_UL119_HCMVA
MCSVLAIALVVALLGDMHPGVKS

SEQ ID NO: 917 - protein, 18 aa, Artificial Sequence
  Human_cytomegalovirus_(strain_AD169)_P08560_VGH3_HCMVA
MMTMWCLTLFVLWMLRVV

SEQ ID NO: 918 - protein, 25 aa, Artificial Sequence
  Human_cytomegalovirus_(strain_AD169)_P17146_UL04_HCMVA
MVMMLRTWRLLPMVLLAAYCYCVFG

SEQ ID NO: 919 - protein, 24 aa, Artificial Sequence
  Human_cytomegalovirus_(strain_AD169)_P16833_UL116_HCMVA
MKRRRRWRGWLLFPALCFCLLCEA

SEQ ID NO: 920 - protein, 23 aa, Artificial Sequence
  Human_cytomegalovirus_(strain_AD169)_P16848_UL31_HCMVA
MGDKPTLVTLLTVAVSSPPPSSP

SEQ ID NO: 921 - protein, 31 aa, Artificial Sequence
  Human_cytomegalovirus_(strain_AD169)_P16721_UL11P_HCMVA
MLLRYITFHREKVLYLAIACFFGIYISFHDA

SEQ ID NO: 922 - protein, 23 aa, Artificial Sequence
  Human_cytomegalovirus_(strain_AD169)_P16809_IR11_HCMVA
MQTYSTPLTLVIVTSLFLFTTQG

SEQ ID NO: 923 - protein, 21 aa, Artificial Sequence
  Human_cytomegalovirus_(strain_AD169)_P09730_US08_HCMVA
MRRWLRLLVGLGCCWVTLAHA

SEQ ID NO: 924 - protein, 24 aa, Artificial Sequence
  Human_cytomegalovirus_(strain_AD169)_P09728_US10_HCMVA
MLRRGSLRNPLAICLLWWLGVVAA

SEQ ID NO: 925 - protein, 19 aa, Artificial Sequence
  Human_cytomegalovirus_(strain_AD169)_P14334_US06_HCMVA
MDLLIRLGFLLMCALPTPG

SEQ ID NO: 926 - protein, 22 aa, Artificial Sequence
  Human_cytomegalovirus_(strain_AD169)_P16778_VGLI_HCMVA
MSPVYVNLLGSVGLLAFWYFSY

SEQ ID NO: 927 - protein, 29 aa, Artificial Sequence
  Human_cytomegalovirus_(strain_AD169)_P69338_UL132_HCMVA
MPAPRGLLRATFLVLVAFGLLLHIDFSDA

SEQ ID NO: 928 - protein, 27 aa, Artificial Sequence
  Human_cytomegalovirus_(strain_AD169)_P09729_US09_HCMVA
MILWSPSTCSFFWHWCLIAVSVLSSRS

SEQ ID NO: 929 - protein, 25 aa, Artificial Sequence
  Human_cytomegalovirus_(strain_AD169)_P16758_UL20_HCMVA
MLGIRAMLVMLDYYWIQLITNNDTR

SEQ ID NO: 930 - protein, 17 aa, Artificial Sequence
  Human_cytomegalovirus_(strain_AD169)_P09731_US07_HCMVA
MRIQLLLVATLVASIVA

SEQ ID NO: 931 - protein, 23 aa, Artificial Sequence
  Human_cytomegalovirus_(strain_Towne)_P17176_GH_HCMVT
MRPGLPSYLIVLAVCLLSHLLSS

SEQ ID NO: 932 - protein, 21 aa, Artificial Sequence
  Human_cytomegalovirus_(strain_Towne)_P17175_UL04_HCMVT
MMLRAWRLMVLLAAYCYYVFA

SEQ ID NO: 933 - protein, 25 aa, Artificial Sequence
  Human_herpesvirus_1_Q05059_Q05059_HHV1
MGGAAARLGAVILFVVIVGLHGVRG

SEQ ID NO: 934 - protein, 30 aa, Artificial Sequence
  Human_herpesvirus_1_Q69472_Q69472_HHV1
MLAVRSLQHLSTVVLITAYGLVLVWYTVFG

SEQ ID NO: 935 - protein, 19 aa, Artificial Sequence
  Human_herpesvirus_1_(strain_17)_P10185_GL_HHV11
MGILGWVGLIAVGVLCVRG

SEQ ID NO: 936 - protein, 24 aa, Artificial Sequence
  Human_herpesvirus_1_(strain_17)_P10228_VGLC_HHV11
MAPGRVGLAVVLWSLLWLGAGVSG

SEQ ID NO: 937 - protein, 23 aa, Artificial Sequence
  Human_herpesvirus_1_(strain_17)_O09800_GN_HHV11
MGPPRRVCRAGLLFVLLVALAAG

SEQ ID NO: 938 - protein, 20 aa, Artificial Sequence
  Human_herpesvirus_1_(strain_17)_P04488_VGLE_HHV11
MDRGAVVGFLLGVCVVSCLA

SEQ ID NO: 939 - protein, 25 aa, Artificial Sequence
  Human_herpesvirus_1_(strain_17)_Q69091_VGLD_HHV11
MGGAAARLGAVILFVVIVGLHGVRS

SEQ ID NO: 940 - protein, 24 aa, Artificial Sequence
  Human_herpesvirus_1_(strain_KOS)_P28986_VGLC_HHV1K
MAPGRVGLAVVLWGLLWLGAGVAG

SEQ ID NO: 941 - protein, 25 aa, Artificial Sequence
  Human_herpesvirus_1_(strain_Patton)_P57083_VGLD_HHV1P
MGGTAARLGAVILFVVIVGLHGVRG

SEQ ID NO: 942 - protein, 22 aa, Artificial Sequence
  Human_herpesvirus_2_Q69465_Q69465_HHV2
MRGGGLICALVVGALVAAVASA

SEQ ID NO: 943 - protein, 27 aa, Artificial Sequence
  Human_herpesvirus_2_Q69466_Q69466_HHV2
MALGRVGLAVGLWGLLWVGVVVVLANA

SEQ ID NO: 944 - protein, 25 aa, Artificial Sequence
  Human_herpesvirus_2_P03172_VGLD_HHV2
MGRLTSGVGTAALLVVAVGLRVVCA

SEQ ID NO: 945 - protein, 22 aa, Artificial Sequence
  Human_herpesvirus_2_Q98VG3_Q98VG3_HHV2
MHAIAPRLLLLFVLSGLPGTRG

SEQ ID NO: 946 - protein, 23 aa, Artificial Sequence
  Human_herpesvirus_2_P13289_VGLE_HHV2
MARGAGLVFFVGVWVVSCLAAAP

SEQ ID NO: 947 - protein, 27 aa, Artificial Sequence
  Human_herpesvirus_2_(strain_G)_P03173_VGLC_HHV2G
MALGRVGLTVGLWGLLWVGVVVVLANA

SEQ ID NO: 948 - protein, 16 aa, Artificial Sequence
  Human_herpesvirus_2_(strain_HG52)_P28278_GL_HHV2H
MGFVCLFGLVVMGAWG

SEQ ID NO: 949 - protein, 56 aa, Artificial Sequence
  Human_herpesvirus_6A_(strain_GS)_P30005_VU47_HHV6G
MHLEVIVQSYKKSKYYFSHTFYLYKFIVVNSPDMLHISQLGLFLGLFAIVMHSANL

SEQ ID NO: 950 - protein, 23 aa, Artificial Sequence
  Human_herpesvirus_6A_(strain_GS)_P68323_GH_HHV6G
MLLRLWVFVLLTPCYGWRPLNIS

SEQ ID NO: 951 - protein, 23 aa, Artificial Sequence
  Human_herpesvirus_6A_(strain_GS)_P36319_VGLB_HHV6G
MSKMVVLFLAVFLMNSVLMIYCD

SEQ ID NO: 952 - protein, 21 aa, Artificial Sequence
  Human_herpesvirus_6A_(strain_Uganda-1102)_Q69553_U18_HHV6U
MKKLTMESLSVYIFVMGVCFT

SEQ ID NO: 953 - protein, 18 aa, Artificial Sequence
  Human_herpesvirus_6A_(strain_Uganda-1102)_P52508_GL_HHV6U
MELLLFVMSLILLTFSKA

SEQ ID NO: 954 - protein, 18 aa, Artificial Sequence
  Human_herpesvirus_6A_(strain_Uganda-1102)_Q69569_U91_HHV6U
MICLFYFNVLIIYLHTFL

SEQ ID NO: 955 - protein, 15 aa, Artificial Sequence
  Human_herpesvirus_6A_(strain_Uganda-1102)_Q69555_U20_HHV6U
MITVFVACLFQCVSS

SEQ ID NO: 956 - protein, 23 aa, Artificial Sequence
  Human_herpesvirus_6A_(strain_Uganda-1102)_P28864_VGLB_HHV6U
MSKMAVLFLAVFLMNSVLMIYCD

SEQ ID NO: 957 - protein, 17 aa, Artificial Sequence
  Human_herpesvirus_6A_(strain_Uganda-1102)_Q89738_OX2V_HHV6U
MSSLMLRLLPLLYIISA

SEQ ID NO: 958 - protein, 28 aa, Artificial Sequence
  Human_herpesvirus_6A_(strain_Uganda-1102)_Q89863_U78_HHV6U
MNMLAYFLYCRQLLLAVVLIEFPPRLCG

SEQ ID NO: 959 - protein, 24 aa, Artificial Sequence
  Human_herpesvirus_6A_(strain_Uganda-1102)_Q89660_DR3_HHV6U
MSGVLSCVLRACACAGLCCWVCMG

SEQ ID NO: 960 - protein, 26 aa, Artificial Sequence
  Human_herpesvirus_6A_(strain_Uganda-1102)_Q69577_RJ1_HHV6U
MARVMTRGMARVSTLATVRVSTLARA

SEQ ID NO: 961 - protein, 20 aa, Artificial Sequence
  Human_herpesvirus_6A_(strain_Uganda-1102)_Q69557_U22_HHV6U
MVPQGCSLVWVSALYVSVIA

SEQ ID NO: 962 - protein, 56 aa, Artificial Sequence
  Human_herpesvirus_6A_(strain_Uganda-1102)_Q06093_VU47_HHV6U
MHLEVIVQSYKKSKYYFSHTFYLYKFIVVNSPDMLHISRLGLFLGLFAIVMHSVNL

SEQ ID NO: 963 - protein, 26 aa, Artificial Sequence
  Human_herpesvirus_6A_(strain_Uganda-1102)_Q06094_GN_HHV6U
MSCKKSARQSLYVSLCLFYILVFAAA

SEQ ID NO: 964 - protein, 17 aa, Artificial Sequence
  Human_herpesvirus_6A_(strain_Uganda-1102)_Q69558_U23_HHV6U
MLFLSFLLVCLCEEVRM

SEQ ID NO: 965 - protein, 23 aa, Artificial Sequence
  Human_herpesvirus_6B_(strain_Z29)_P52549_VU47_HHV6Z
MLHISRLGLFLALFAIVMHSVNL

SEQ ID NO: 966 - protein, 23 aa, Artificial Sequence
  Human_herpesvirus_6B_(strain_Z29)_P36320_VGLB_HHV6Z
MSKMRVLFLAVFLMNSVLMIYCD

SEQ ID NO: 967 - protein, 23 aa, Artificial Sequence
  Human_herpesvirus_6B_(strain_Z29)_P52543_GH_HHV6Z
MLFRLWVFVLLTPCYSWRPWTIS

SEQ ID NO: 968 - protein, 26 aa, Artificial Sequence
  Human_herpesvirus_6B_(strain_Z29)_P52547_GN_HHV6Z
MSCKKGARQRLYVSLWLFYILVFAAA

SEQ ID NO: 969 - protein, 16 aa, Artificial Sequence
  Human_herpesvirus_7_(strain_JI)_P52353_GH_HHV7J
MYFYINSLLLIVSING

SEQ ID NO: 970 - protein, 21 aa, Artificial Sequence
  Human_herpesvirus_7_(strain_JI)_P52509_GL_HHV7J
MKTNIFFIFLISILNQIYALF

SEQ ID NO: 971 - protein, 24 aa, Artificial Sequence
  Human_herpesvirus_7_(strain_JI)_P52366_GN_HHV7J
MTLYKIVSKPIILLAFFFTRVVFT

SEQ ID NO: 972 - protein, 22 aa, Artificial Sequence
  Human_herpesvirus_7_(strain_JI)_P52352_VGLB_HHV7J
MKILFLSVFITFSLQLSLQTEA

SEQ ID NO: 973 - protein, 26 aa, Artificial Sequence
  Human_herpesvirus_8_O36551_O36551_HHV8
MSSTQIRTEIPVALLILCLCLVACHA

SEQ ID NO: 974 - protein, 24 aa, Artificial Sequence
  Human_herpesvirus_8_P88963_OX2V_HHV8
MSSLFISLPWVAFIWLALLGAVGG

SEQ ID NO: 975 - protein, 29 aa, Artificial Sequence
  Human_immunodeficiency_virus_1_Q90VS8_Q90VS8_9HIV1
MRVKETQMNWPNLWKWGTLILGLVIICSA

SEQ ID NO: 976 - protein, 30 aa, Artificial Sequence
  Human_immunodeficiency_virus_1_Q9DSL8_Q9DSL8_9HIV1
MRVKETQMNWPNLWKWGTLILGLVIICSAS

SEQ ID NO: 977 - protein, 29 aa, Artificial Sequence
  Human_immunodeficiency_virus_1_Q9WIU9_Q9WIU9_9HIV1
MIVTMRVMEKKNKKLWILCMIMALIIPCL

SEQ ID NO: 978 - protein, 29 aa, Artificial Sequence
  Human_immunodeficiency_virus_1_Q9YKB2_Q9YKB2_9HIV1
MTVTMKVMEKKNRKLWILYIVMALIIPCL

SEQ ID NO: 979 - protein, 21 aa, Artificial Sequence
  Human_immunodeficiency_virus_2_Q9WIU6_Q9WIU6_9HIV2
MCGRNQLLVTTLLASACLISC

SEQ ID NO: 980 - protein, 31 aa, Artificial Sequence
  Human_immunodeficiency_virus_type_1_(isolate_Z2/CDC-Z34_group_M_s ubtype_D)_P12487_ENV_HV1Z2
MRVRGIERNCQNLWKWGIMLLGILMTCSNAD

SEQ ID NO: 981 - protein, 28 aa, Artificial Sequence
  Human_immunodeficiency_virus_type_1_(strain_89.6_group_M_subtype_ B)_Q73372_ENV_HV1B9
MRVKEIRKNWQHLRGGILLLGMLMICSA

SEQ ID NO: 982 - protein, 22 aa, Artificial Sequence
  Human_immunodeficiency_virus_type_2_(isolate_BEN_subtype_A)_P1809 4_ENV_HV2BE
MEPGRNQLFVVILLTSACLVYC

SEQ ID NO: 983 - protein, 24 aa, Artificial Sequence
  Human_immunodeficiency_virus_type_2_(isolate_CAM2_subtype_A)_P241 05_ENV_HV2CA
MERGRNQLLIAILLASACLIYCRQ

SEQ ID NO: 984 - protein, 24 aa, Artificial Sequence
  Human_immunodeficiency_virus_type_2_(isolate_D194_subtype_A)_P177 55_ENV_HV2D1
MEPGRNQLLVAILLTSACLIYCKQ

SEQ ID NO: 985 - protein, 23 aa, Artificial Sequence
  Human_immunodeficiency_virus_type_2_(isolate_D205_subtype_B)_P158 31_ENV_HV2D2
MAYFSSRLPIALLLIGISGFVCK

SEQ ID NO: 986 - protein, 24 aa, Artificial Sequence
  Human_immunodeficiency_virus_type_2_(isolate_EHO_subtype_B)_Q8960 7_ENV_HV2EH
MAHVNNYLLVTLLLISIYGYMGKN

SEQ ID NO: 987 - protein, 21 aa, Artificial Sequence
  Human_immunodeficiency_virus_type_2_(isolate_Ghana-1_subtype_A)_P 18040_ENV_HV2G1
MCGKSLLCVASLLASAYLVYC

SEQ ID NO: 988 - protein, 22 aa, Artificial Sequence
  Human_immunodeficiency_virus_type_2_(isolate_KR_subtype_A)_Q74126 _ENV_HV2KR
MDSRNQLIVAILLTSACLIYCA

SEQ ID NO: 989 - protein, 22 aa, Artificial Sequence
  Human_immunodeficiency_virus_type_2_(isolate_NIH-Z_subtype_A)_P05 883_ENV_HV2NZ
MKGSKNQLLIAIVLASAYLIHC

SEQ ID NO: 990 - protein, 19 aa, Artificial Sequence
  Human_immunodeficiency_virus_type_2_(isolate_ROD_subtype_A)_P0457 7_ENV_HV2RO
MMNQLLIAILLASACLVYC

SEQ ID NO: 991 - protein, 21 aa, Artificial Sequence
  Human_immunodeficiency_virus_type_2_(isolate_SBLISY_subtype_A)_P1 2449_ENV_HV2SB
MSGKIQLLVAFLLTSACLIYC

SEQ ID NO: 992 - protein, 24 aa, Artificial Sequence
  Human_immunodeficiency_virus_type_2_(isolate_ST_subtype_A)_P20872 _ENV_HV2ST
MCGRNQLFVASLLASACLIYCVQY

SEQ ID NO: 993 - protein, 26 aa, Artificial Sequence
  Human_immunodeficiency_virus_type_2_(isolate_UC1_subtype_B)_Q7663 8_ENV_HV2UC
MAHTSNHLFILLLLISVYGFLGHKKN

SEQ ID NO: 994 - protein, 21 aa, Artificial Sequence
  Human_parainfluenza_1_virus_(strain_C39)_P12605_FUS_PI1HC
MQKSEILFLIYSSLLLSSSLC

SEQ ID NO: 995 - protein, 23 aa, Artificial Sequence
  Human_parainfluenza_2_virus_P25467_FUS_PI2H
MHHLHPMIVCIFVMYTGIVGSDA

SEQ ID NO: 996 - protein, 18 aa, Artificial Sequence
  Human_parainfluenza_3_virus_(strain_Wash/47885/57)_P06828_FUS_PI3 H4
MPTSILLIITTMIMASFC

SEQ ID NO: 997 - protein, 22 aa, Artificial Sequence
  Human_parainfluenza_virus_3_Q84193_Q84193_9PARA
MPTSILLIITTMIMASFCQIDI

SEQ ID NO: 998 - protein, 20 aa, Artificial Sequence
  Human_respiratory_syncytial_virus_Q84850_Q84850_HRSV
MELLILKANAITTILTAVTF

SEQ ID NO: 999 - protein, 14 aa, Artificial Sequence
  Human_respiratory_syncytial_virus_Q82017_Q82017_HRSV
MQLPQSSLQSHFVL

SEQ ID NO: 1000 - protein, 21 aa, Artificial Sequence
  Human_respiratory_syncytial_virus_A_(strain_A2)_P03420_FUS_HRSVA
MELLILKANAITTILTAVTFC

SEQ ID NO: 1001 - protein, 21 aa, Artificial Sequence
  Human_respiratory_syncytial_virus_A_(strain_Long)_P12568_FUS_HRSV L
MELPILKANAITTILAAVTFC

SEQ ID NO: 1002 - protein, 21 aa, Artificial Sequence
  Human_respiratory_syncytial_virus_A_(strain_RSS-2)_P11209_FUS_HRS VR
MELPILKTNAITAILAAVTLC

SEQ ID NO: 1003 - protein, 22 aa, Artificial Sequence
  Human_respiratory_syncytial_virus_B_(strain_18537)_P13843_FUS_HRS V1
MELLIHRSSAIFLTLAVNALYL

SEQ ID NO: 1004 - protein, 18 aa, Artificial Sequence
  Human_rotavirus_ID45/2_O40623_O40623_9REOV
MGGRSLKTWRRDRAKYCS

SEQ ID NO: 1005 - protein, 15 aa, Artificial Sequence
  Human_SARS_coronavirus_Q7TFA0_NS8A_CVHSA
MKLLIVLTCISLCSC

SEQ ID NO: 1006 - protein, 13 aa, Artificial Sequence
  Human_SARS_coronavirus_P59594_SPIKE_CVHSA
MFIFLLFLTLTSG

SEQ ID NO: 1007 - protein, 20 aa, Artificial Sequence
  Human_T-cell_leukemia_virus_1_(isolate_Caribbea_CH_subtype_A)_Q03 816_ENV_HTL1N
MGKFLATLILFFQFCPLILG

SEQ ID NO: 1008 - protein, 20 aa, Artificial Sequence
  Human_T-cell_leukemia_virus_1_(isolate_Melanesia_mel5_subtype_C)_ P0C212_ENV_HTL1L
MGKFLATLILFFQFCPLILS

SEQ ID NO: 1009 - protein, 20 aa, Artificial Sequence
  Human_T-cell_leukemia_virus_1_(strain_Japan_ATK-1_subtype_A)_P033 81_ENV_HTL1A
MGKFLATLILFFQFCPLIFG

SEQ ID NO: 1010 - protein, 18 aa, Artificial Sequence
  Human_T-cell_leukemia_virus_2_P03383_ENV_HTLV2
MGNVFFLLLFSLTHFPLA

SEQ ID NO: 1011 - protein, 20 aa, Artificial Sequence
  Human_T-cell_leukemia_virus_3_(strain_2026ND)_Q0R5Q9_ENV_HTL32
MGKFCLYFCLIYILFSASSG

SEQ ID NO: 1012 - protein, 22 aa, Artificial Sequence
  Human_T-cell_leukemia_virus_3_(strain_Pyl43)_Q09SZ7_ENV_HTL3P
MGKSGLYFSLICFYTLFPSSFG

SEQ ID NO: 1013 - protein, 20 aa, Artificial Sequence
  Human_T-lymphotropic_virus_1_Q80810_Q80810_9DELA
MGKFLTTLILFLQFCPPILC

SEQ ID NO: 1014 - protein, 14 aa, Artificial Sequence
  Human_torovirus_Q9Q9G3_HEMA_HUTV
MLSLILFFPSFAFA

SEQ ID NO: 1015 - protein, 22 aa, Artificial Sequence
  Haemophilus_influenzae_Q57449_Y362_HAEIN
MRNSFKIMTALALGLFAMQANA

SEQ ID NO: 1016 - protein, 20 aa, Artificial Sequence
  Haemophilus_influenzae_P14212_HIFA2_HAEIN
MKKTLLGSLILLAFAGNVQA

SEQ ID NO: 1017 - protein, 21 aa, Artificial Sequence
  Haemophilus_influenzae_P45354_HXUA2_HAEIN
MYKLNVISLIILTTCSGAAYA

SEQ ID NO: 1018 - protein, 23 aa, Artificial Sequence
  Haemophilus_influenzae_P35755_FBPA_HAEIN
MQFKHFKLATLAAALAFSANSFA

SEQ ID NO: 1019 - protein, 24 aa, Artificial Sequence
  Haemophilus_influenzae_Q9ZA21_HGPA_HAEIN
MTNFRLNVLAYSVMLGLTASVAYA

SEQ ID NO: 1020 - protein, 20 aa, Artificial Sequence
  Haemophilus_influenzae_Q48220_OPP2B_HAEIN
MKKTLAALIVGAFAASAANA

SEQ ID NO: 1021 - protein, 18 aa, Artificial Sequence
  Haemophilus_influenzae_P10325_PCP_HAEIN
MKKTNMALALLVAFSVTG

SEQ ID NO: 1022 - protein, 20 aa, Artificial Sequence
  Haemophilus_influenzae_P26093_HEL_HAEIN
MKTTLKMTALAALSAFVLAG

SEQ ID NO: 1023 - protein, 26 aa, Artificial Sequence
  Haemophilus_influenzae_P45356_HXUB2_HAEIN
MKMRPRYSVIASAVSLGFVLSKSVMA

SEQ ID NO: 1024 - protein, 23 aa, Artificial Sequence
  Haemophilus_influenzae_P44526_ZNUA_HAEIN
MKKLLKISAISAALLSAPMMANA

SEQ ID NO: 1025 - protein, 22 aa, Artificial Sequence
  Haemophilus_influenzae_P44544_NANM_HAEIN
MKLTKTALCTALFATFTFSANA

SEQ ID NO: 1026 - protein, 25 aa, Artificial Sequence
  Haemophilus_influenzae_P44569_5NTD_HAEIN
MLLSKKSASFALSAFAMLFTSVALA

SEQ ID NO: 1027 - protein, 23 aa, Artificial Sequence
  Haemophilus_influenzae_P44737_RBSB_HAEIN
MKKLTALTSAVLLGLAVSSSASA

SEQ ID NO: 1028 - protein, 20 aa, Artificial Sequence
  Haemophilus_influenzae_P43972_Y246_HAEIN
MNLTKLLPAFAAAVVLSACA

SEQ ID NO: 1029 - protein, 21 aa, Artificial Sequence
  Haemophilus_influenzae_P44276_Y1624_HAEIN
MELKKIAVGLTALLGMSVANA

SEQ ID NO: 1030 - protein, 21 aa, Artificial Sequence
  Haemophilus_influenzae_P45996_OMP53_HAEIN
MKKTAIALVVAGLAAASVAQA

SEQ ID NO: 1031 - protein, 19 aa, Artificial Sequence
  Haemophilus_influenzae_P10324_PAL_HAEIN
MNKFVKSLLVAGSVAALAA

SEQ ID NO: 1032 - protein, 19 aa, Artificial Sequence
  Haemophilus_influenzae_P45091_ARTI_HAEIN
MKKTLLTAILLGASVAASA

SEQ ID NO: 1033 - protein, 22 aa, Artificial Sequence
  Haemophilus_influenzae_P10641_OPP12_HAEIN
MKKFNQSLLATAMLLAAGGANA

SEQ ID NO: 1034 - protein, 24 aa, Artificial Sequence
  Haemophilus_influenzae_P45323_MODA_HAEIN
MKKLTKISTALLIAGLGFSFAASA

SEQ ID NO: 1035 - protein, 18 aa, Artificial Sequence
  Haemophilus_influenzae_Q06282_GLPQ_HAEIN
MKLKTLALSLLAAGVLAG

SEQ ID NO: 1036 - protein, 24 aa, Artificial Sequence
  Haemophilus_influenzae_P44883_DGAL_HAEIN
MKKTAVLSTVAFAIALGSASASFA

SEQ ID NO: 1037 - protein, 21 aa, Artificial Sequence
  Haemophilus_influenzae_P43843_ASPG2_HAEIN
MKLTKLALCTLFGLGVSIANA

SEQ ID NO: 1038 - protein, 23 aa, Artificial Sequence
  Haemophilus_influenzae_Q57483_OM26_HAEIN
MKNIAKVTALALGIALASGYASA

SEQ ID NO: 1039 - protein, 18 aa, Artificial Sequence
  Influenza_A_virus_Q7TFA3_Q7TFA3_9INFA
MNTQILVFALVAIIPTNA

SEQ ID NO: 1040 - protein, 16 aa, Artificial Sequence
  Influenza_A_virus_(strain_A/Aichi/2/1968_H3N2)_P03437_HEMA_I68A0
MKTIIALSYIFCLALG

SEQ ID NO: 1041 - protein, 16 aa, Artificial Sequence
  Influenza_A_virus_(strain_A/Budgerigar/Hokkaido/1/1977_H4N6)_P196 94_HEMA_I77AG
MLSVVILFLLVAENSS

SEQ ID NO: 1042 - protein, 16 aa, Artificial Sequence
  Influenza_A_virus_(strain_A/Chicken/Alabama/1/1975_H4N8)_P19695_H EMA_I75A4
MLSITILFLLIAEGSS

SEQ ID NO: 1043 - protein, 17 aa, Artificial Sequence
  Influenza_A_virus_(strain_A/Chicken/Germany/n/1949_H10N7)_P12581_ HEMA_I49A0
MYKVVVIIALLGAVRGL

SEQ ID NO: 1044 - protein, 16 aa, Artificial Sequence
  Influenza_A_virus_(strain_A/Chicken/Hong_Kong/31.2/2002_H5N1_geno type_X1)_Q6DQ21_HEMA_I02A2
MEKIVLLLAIVSLVKS

SEQ ID NO: 1045 - protein, 16 aa, Artificial Sequence
  Influenza_A_virus_(strain_A/Chicken/Hong_Kong/37.4/2002_H5N1_geno type_X2)_Q6DQ20_HEMA_I02A3
MKKIVLLLAIVSLVKS

SEQ ID NO: 1046 - protein, 5 aa, Artificial Sequence
  Influenza_A_virus_(strain_A/Chicken/Hong_Kong/715.5/2001_H5N1_gen otype_E)_Q80A22_HEMA_I01A3
SLVKS

SEQ ID NO: 1047 - protein, 8 aa, Artificial Sequence
  Influenza_A_virus_(strain_A/Chicken/Hong_Kong/YU22/2002_H5N1_geno type_Z)_Q6DQ18_HEMA_I02A6
AIVSLVKS

SEQ ID NO: 1048 - protein, 16 aa, Artificial Sequence
  Influenza_A_virus_(strain_A/Chicken/Scotland/1959_H5N1)_P09345_HE MA_I59A0
MERIVLLLAIVSLVKS

SEQ ID NO: 1049 - protein, 18 aa, Artificial Sequence
  Influenza_A_virus_(strain_A/Chicken/Victoria/1/1985_H7N7)_P09343_ HEMA_I85A3
MNTQILILTLVAAIHTNA

SEQ ID NO: 1050 - protein, 18 aa, Artificial Sequence
  Influenza_A_virus_(strain_A/Chicken/Weybridge_H7N7)_P36346_HEMA_I 000F
MNTQILVFALVAVIHTNA

SEQ ID NO: 1051 - protein, 17 aa, Artificial Sequence
  Influenza_A_virus_(strain_A/Duck/Alberta/35/1976_H1N1)_P26562_HEM A_I76A4
MEAKLFVLFCTFTVLKA

SEQ ID NO: 1052 - protein, 17 aa, Artificial Sequence
  Influenza_A_virus_(strain_A/Duck/Alberta/60/1976_H12N5)_P03446_HE MA_I76A2
MEKFIILSTVLAASFAY

SEQ ID NO: 1053 - protein, 16 aa, Artificial Sequence
  Influenza_A_virus_(strain_A/Duck/Alberta/78/1976_H3N8)_P26134_HEM A_I76A3
MKTIIVLSYFFCLALS

SEQ ID NO: 1054 - protein, 16 aa, Artificial Sequence
  Influenza_A_virus_(strain_A/Duck/Czechoslovakia/1956_H4N6)_P19696 _HEMA_I56A1
MLSIVILFLLIAENSS

SEQ ID NO: 1055 - protein, 16 aa, Artificial Sequence
  Influenza_A_virus_(strain_A/Duck/England/1/1956_H11N6)_P04661_HEM A_I56A2
MEKTLLFAAIFLCVKA

SEQ ID NO: 1056 - protein, 16 aa, Artificial Sequence
  Influenza_A_virus_(strain_A/Duck/Ireland/113/1983_H5N8)_P11132_HE MA_I83A3
MEEIVLLFAIVSLARS

SEQ ID NO: 1057 - protein, 17 aa, Artificial Sequence
  Influenza_A_virus_(strain_A/Duck/Manitoba/1/1953_H10N7)_P03444_HE MA_I53A0
MYKIVLVLTLFGAVNGL

SEQ ID NO: 1058 - protein, 16 aa, Artificial Sequence
  Influenza_A_virus_(strain_A/Duck/Memphis/546/1976_H11N9)_P03445_H EMA_I76AH
MKKVLLFAAIIICIRA

SEQ ID NO: 1059 - protein, 16 aa, Artificial Sequence
  Influenza_A_virus_(strain_A/Duck/New_York/12/1978_H11N6)_P04660_H EMA_I78AE
MKKILLFTVIFLYAKA

SEQ ID NO: 1060 - protein, 16 aa, Artificial Sequence
  Influenza_A_virus_(strain_A/Duck/New_Zealand/31/1976_H4N6)_P19697 _HEMA_I76AK
MLSIVVLLLLMAEGSS

SEQ ID NO: 1061 - protein, 16 aa, Artificial Sequence
  Influenza_A_virus_(strain_A/Duck/Ukraine/1/1963_H3N8)_P03442_HEMA _I63A3
MKTVIALSYILCLTFG

SEQ ID NO: 1062 - protein, 16 aa, Artificial Sequence
  Influenza_A_virus_(strain_A/England/321/1977_H3N2)_P03440_HEMA_I7 7A8
MKTIIALSYIFCQVLA

SEQ ID NO: 1063 - protein, 16 aa, Artificial Sequence
  Influenza_A_virus_(strain_A/Equine/Algiers/1972_H3N8)_P16994_HEMA _I72A0
MKTTIILILLIHWVHS

SEQ ID NO: 1064 - protein, 18 aa, Artificial Sequence
  Influenza_A_virus_(strain_A/Equine/C.Detroit/1/1964_H7N7)_P26096_ HEMA_I64A5
MNTQILILATSAFLCVRA

SEQ ID NO: 1065 - protein, 18 aa, Artificial Sequence
  Influenza_A_virus_(strain_A/Equine/Cambridge/1/1963_H7N7)_P26094_ HEMA_I63A0
MNTQILILATSAFFYVRA

SEQ ID NO: 1066 - protein, 18 aa, Artificial Sequence
  Influenza_A_virus_(strain_A/Equine/Cambridge/1/1973_H7N7)_P26095_ HEMA_I73A1
MNTQILILAISAFLCVRA

SEQ ID NO: 1067 - protein, 16 aa, Artificial Sequence
  Influenza_A_virus_(strain_A/Equine/Fontainebleau/1976_H3N8)_P1699 5_HEMA_I76A8
MKTTIILILLTHWVYS

SEQ ID NO: 1068 - protein, 16 aa, Artificial Sequence
  Influenza_A_virus_(strain_A/Equine/Kentucky/1/1987_H3N8)_P16996_H EMA_I87A3
MKTTIVLILLTHWVYS

SEQ ID NO: 1069 - protein, 16 aa, Artificial Sequence
  Influenza_A_virus_(strain_A/Equine/Miami/1/1963_H3N8)_P15658_HEMA _I63A2
MKTTTILILLTHWVHS

SEQ ID NO: 1070 - protein, 18 aa, Artificial Sequence
  Influenza_A_virus_(strain_A/Fowl_plague_virus/Rostock/8/1934_H7N1 )_P03459_HEMA_I34A0
MNTQILVFALVAVIPTNA

SEQ ID NO: 1071 - protein, 16 aa, Artificial Sequence
  Influenza_A_virus_(strain_A/Grey_teal/Australia/2/1979_H4N4)_P196 98_HEMA_I79A7
MLSIVVLLLLIAESSS

SEQ ID NO: 1072 - protein, 14 aa, Artificial Sequence
  Influenza_A_virus_(strain_A/Guinea_fowl/Hong_Kong/38/2002_H5N1_ge notype_X0)_Q6DQ22_HEMA_I02A1
KIVLLLAIVSLVKS

SEQ ID NO: 1073 - protein, 18 aa, Artificial Sequence
  Influenza_A_virus_(strain_A/Gull/Astrakhan/227/1984_H13N6)_P13101 _HEMA_I84A4
MDIQAVALLILTSTCVQA

SEQ ID NO: 1074 - protein, 18 aa, Artificial Sequence
  Influenza_A_virus_(strain_A/Gull/Maryland/704/1977_H13N6)_P13103_ HEMA_I77AF
MALNVIATLTLISVCVHA

SEQ ID NO: 1075 - protein, 17 aa, Artificial Sequence
  Influenza_A_virus_(strain_A/Harbin/1/1988_H1N2)_P28730_HEMA_I88A0
MKAKLLILFCAFTATDA

SEQ ID NO: 1076 - protein, 16 aa, Artificial Sequence
  Influenza_A_virus_(strain_A/Hong_Kong/212/2003_H5N1_genotype_Z+)_ Q6J8F6_HEMA_I03A0
MEKIVLLFAIVSLVKS

SEQ ID NO: 1077 - protein, 15 aa, Artificial Sequence
  Influenza_A_virus_(strain_A/Japan/305/1957_H2N2)_P03451_HEMA_I57A 0
MAIIYLILLFTAVRG

SEQ ID NO: 1078 - protein, 17 aa, Artificial Sequence
  Influenza_A_virus_(strain_A/Kiev/59/1979_H1N1)_P18875_HEMA_I79A4
MKAKLLVLLCALSATDA

SEQ ID NO: 1079 - protein, 12 aa, Artificial Sequence
  Influenza_A_virus_(strain_A/Mallard/Astrakhan/244/1982_H14N6)_P26 137_HEMA_I82A0
LVALALSQTAYS

SEQ ID NO: 1080 - protein, 17 aa, Artificial Sequence
  Influenza_A_virus_(strain_A/Mallard/Astrakhan/263/1982_H14N5)_P26 136_HEMA_I82A1
MIALILVALALSHTAYS

SEQ ID NO: 1081 - protein, 16 aa, Artificial Sequence
  Influenza_A_virus_(strain_A/Mallard/New_York/6874/1978_H3N2)_P261 38_HEMA_I78A4
MKTIIVLSCFFCLAFS

SEQ ID NO: 1082 - protein, 16 aa, Artificial Sequence
  Influenza_A_virus_(strain_A/Memphis/1/1971_H3N2)_P03449_HEMA_I71A 1
MKTIIALSHIFCLVLG

SEQ ID NO: 1083 - protein, 16 aa, Artificial Sequence
  Influenza_A_virus_(strain_A/Memphis/102/1972_H3N2)_P03439_HEMA_I7 2A3
MKTIIALSYIFCLVLG

SEQ ID NO: 1084 - protein, 17 aa, Artificial Sequence
  Influenza_A_virus_(strain_A/Mink/Sweden/1984_H10N4)_P12439_HEMA_I 84A3
MYKVVVIIALLGAVKGL

SEQ ID NO: 1085 - protein, 17 aa, Artificial Sequence
  Influenza_A_virus_(strain_A/Puerto_Rico/8/1934_H1N1)_P03452_HEMA_ I34A1
MKANLLVLLCALAAADA

SEQ ID NO: 1086 - protein, 16 aa, Artificial Sequence
  Influenza_A_virus_(strain_A/Ruddy_Turnstone/New_Jersey/47/1985_H4 N6)_P19700_HEMA_I85A7
MLSITILFLLIAEVSS

SEQ ID NO: 1087 - protein, 16 aa, Artificial Sequence
  Influenza_A_virus_(strain_A/Shearwater/Australia/1972_H6N5)_P0344 8_HEMA_I72A5
MIAIIVVAILATAGRS

SEQ ID NO: 1088 - protein, 16 aa, Artificial Sequence
  Influenza_A_virus_(strain_A/Shearwater/Australia/1975_H5N3)_P0344 7_HEMA_I75A1
MERVVLLLAMISLVKS

SEQ ID NO: 1089 - protein, 16 aa, Artificial Sequence
  Influenza_A_virus_(strain_A/Swine/Colorado/1/1977_H3N2)_P26139_HE MA_I77A4
MKTIIALSYIFCLVFA

SEQ ID NO: 1090 - protein, 17 aa, Artificial Sequence
  Influenza_A_virus_(strain_A/Swine/Indiana/1726/1988_H1N1)_P26140_ HEMA_I88A6
MKAILLVLLYTFTAANA

SEQ ID NO: 1091 - protein, 17 aa, Artificial Sequence
  Influenza_A_virus_(strain_A/Swine/New_Jersey/11/1976_H1N1)_P03455 _HEMA_I76AI
MKAILLVLLCTFAATNA

SEQ ID NO: 1092 - protein, 16 aa, Artificial Sequence
  Influenza_A_virus_(strain_A/Swine/Ukkel/1/1984_H3N2)_P26141_HEMA_ I84A5
MKTLIALSYIFCLVLG

SEQ ID NO: 1093 - protein, 17 aa, Artificial Sequence
  Influenza_A_virus_(strain_A/Taiwan/1/1986_H1N1)_P12590_HEMA_I86A0
MKAKLLVLLCAFTATDA

SEQ ID NO: 1094 - protein, 12 aa, Artificial Sequence
  Influenza_A_virus_(strain_A/Teal/China/2978.1/2002_H5N1_genotype_ W)_Q6DQ15_HEMA_I02A7
VLLLAIVSLVKS

SEQ ID NO: 1095 - protein, 16 aa, Artificial Sequence
  Influenza_A_virus_(strain_A/Tern/Australia/G70C/1975_H11N9)_P0466 2_HEMA_I75A5
MEKLLLFATIILCVKA

SEQ ID NO: 1096 - protein, 16 aa, Artificial Sequence
  Influenza_A_virus_(strain_A/Turkey/Ireland/1378/1983_H5N8)_P11135 _HEMA_I83A4
MEKIVLLFAIVSLVRS

SEQ ID NO: 1097 - protein, 16 aa, Artificial Sequence
  Influenza_A_virus_(strain_A/Turkey/Ontario/6118/1968_H8N4)_P03456 _HEMA_I68A3
MEKFIAIATLASTNAY

SEQ ID NO: 1098 - protein, 16 aa, Artificial Sequence
  Influenza_A_virus_(strain_A/Turkey/Ontario/7732/1966_H5N9)_P16060 _HEMA_I66A0
MERIVIALAIISVVKG

SEQ ID NO: 1099 - protein, 18 aa, Artificial Sequence
  Influenza_A_virus_(strain_A/Turkey/Oregon/1971_H7N3)_P03458_HEMA_ I71A2
MNTQILVFIACVLIKAKG

SEQ ID NO: 1100 - protein, 18 aa, Artificial Sequence
  Influenza_A_virus_(strain_A/Turkey/Wisconsin/1/1966_H9N2)_P03457_ HEMA_I66A1
METKAIIAALLMVTAANA

SEQ ID NO: 1101 - protein, 18 aa, Artificial Sequence
  Influenza_A_virus_(strain_A/Whale/Maine/328/1984_H13N2)_P13102_HE MA_I84A2
MDIRPIIISLLISTCVQA

SEQ ID NO: 1102 - protein, 17 aa, Artificial Sequence
  Influenza_A_virus_(strain_A/Wilson-Smith/1933_H1N1)_P03454_HEMA_I 33A0
MKAKLLVLLYAFVATDA

SEQ ID NO: 1103 - protein, 17 aa, Artificial Sequence
  Influenza_A_virus_(strain_A/Xianfeng/3/1989_H1N2)_P28731_HEMA_I89 A5
MKAKLLVLFCAFTATDA

SEQ ID NO: 1104 - protein, 25 aa, Artificial Sequence
  HsPLAT
MDAMKRGLCCVLLLCGAVFVDSVTG

SEQ ID NO: 1105 - protein, 22 aa, Artificial Sequence
  MmCol1a1
MFSFVDLRLLLLLGATALLTHG

SEQ ID NO: 1106 - protein, 22 aa, Artificial Sequence
  MmKappaLC
MDFQVQIFSFLLISASVIISRG

SEQ ID NO: 1107 - protein, 22 aa, Artificial Sequence
  MmMfge8
MQVSRVLAALCGMLLCASGLFA

SEQ ID NO: 1108 - protein, 26 aa, Artificial Sequence
  HLA-A2-SP
MAVMAPRTLVLLLSGALALTQTWAGS

SEQ ID NO: 1109 - protein, 20 aa, Artificial Sequence
  SP-MmIgk
MRTPAQFLGILLLWFPGIKC

SEQ ID NO: 1110 - protein, 21 aa, Artificial Sequence
  SP-MmIgkappa
METDTLLLWVLLLWVPGSTGD

SEQ ID NO: 1111 - protein, 17 aa, Artificial Sequence
  SP-H1N1(Netherlands2009)-HA
MKAILVVLLYTFATANA

SEQ ID NO: 1112 - protein, 34 aa, Artificial Sequence
  SP-HsEpo
MGVHECPAWLWLLLSLLSLPLGLPVLGESRGRRC

SEQ ID NO: 1113 - protein, 23 aa, Artificial Sequence
  SP-HRSV(B1)-F
MELLIHRLSAIFLTLAINALYLT

SEQ ID NO: 1114 - protein, 19 aa, Artificial Sequence
  SP-MmSftp4
MLPFLSMLVLLVQPLGNLG

SEQ ID NO: 1115 - protein, 19 aa, Artificial Sequence
  SP-M99651
MELGLSWIFLLAILKGVQC

SEQ ID NO: 1116 - protein, 232 aa, Artificial Sequence
  gi|381145024|gb|AFF59210.1| immunoglobulin G1 Fc region, partial [Homo sapiens]_dimerization
EPKSCDKTHTCPPCPAPELLGGPSVFLFPPKPKDTLMISRTPGVTCVVVDVSHEDPEVKFNWYVDGVEVHNAKTKPREEQYNSTYRVVSVLTVLHQDWLNGKEYKCKVSNKALPAPIEKTISKAKGQPREPQVYTLPPSRDELTKNQVSLTCLVKGFYPSDIAVEWESNGQPENNYKTTPPVLDSDGSFFLYSKLTVDKSRWQQGNVFSCSVMHEALHNHYTQKSLSLSPGK

SEQ ID NO: 1117 - protein, 227 aa, Artificial Sequence
  HsIgG1-FcHC(6-232)(wt)
DKTHTCPPCPAPELLGGPSVFLFPPKPKDTLMISRTPEVTCVVVDVSHEDPEVKFNWYVDGVEVHNAKTKPREEQYNSTYRVVSVLTVLHQDWLNGKEYKCKVSNKALPAPIEKTISKAKGQPREPQVYTLPPSREEMTKNQVSLTCLVKGFYPSDIAVEWESNGQPENNYKTTPPVLDSDGSFFLYSKLTVDKSRWQQGNVFSCSVMHEALHNHYTQKSLSLSPGK

SEQ ID NO: 1118 - protein, 214 aa, Artificial Sequence
  gi|266618624|pdb|3HKF|A Chain A, Murine Unglycosylated Igg Fc Fragment
MEVSSVFIFPPKPKDVLTITLTPKVTCVVVDISKDDPEVQFSWFVDDVEVHTAQTQPREEQFNSTFRSVSELPIMHQDWLNGKEFKCRVNSAAFPAPIEKTISKTKGRPKAPQVYTIPPPKEQMAKDKVSLTCMITDFFPEDITVEWQWNGQPAENYKNTQPIMDTDGSYFVYSKLNVQKSNWEAGNTFTCSVLHEGLHNHHTEKSLSHSPGKE

SEQ ID NO: 1119 - protein, 232 aa, Artificial Sequence
  MmIgG2aFc(wt)_dimerizationDomain
PRGPTIKPCPPCKCPAPNLLGGPSVFIFPPKIKDVLMISLSPIVTCVVVDVSEDDPDVQISWFVNNVEVHTAQTQTHREDYNSTLRVVSALPIQHQDWMSGKEFKCKVNNKDLPAPIERTISKPKGSVRAPQVYVLPPPEEEMTKKQVTLTCMVTDFMPEDIYVEWTNNGKTELNYKNTEPVLDSDGSYFMYSKLRVEKKNWVERNSYSCSVVHEGLHNHHTTKSFSRTPGK

SEQ ID NO: 1120 - protein, 466 aa, Artificial Sequence
  MmIgG2a_fullLength
MMVLSLLYLLTALPGILSEVQLQESGPSLVKPSQTLSLTCSVTGDSITSGYWNWIRKFPGNKLEYMGYISYSGSTYYNPSLKNRISITRDTSRNQFSLHLNSVITEDTATYYCAGSTMITTRAGHWGQGTLVTVSAAKTTAPSVYPLAPVCGDTTGSSVTLGCLVKGYFPEPVTLTWNSGSLSSGVHTFPAVLQSDLYTLSSSVTVTSSTWPSQSITCNVAHPASSTKVDKKIEPRGPTIKPCPPCKCPAPNLLGGPSVFIFPPKIKDVLMISLSPIVTCVVVDVSEDDPDVQISWFVNNVEVHTAQTQTHREDYNSTLRVVSALPIQHQDWMSGKEFKCKVNNKDLPAPIERTISKPKGSVRAPQVYVLPPPEEEMTKKQVTLTCMVTDFMPEDIYVEWTNNGKTELNYKNTEPVLDSDGSYFMYSKLRVEKKNWVERNSYSCSVVHEGLHNHHTTKSFSRTPGK

SEQ ID NO: 1121 - protein, 29 aa, Artificial Sequence
  isoleucine-zipper_trimerizationDomain
GEIAAIKQEIAAIKKEIAAIKWEIAAIKQ

SEQ ID NO: 1122 - protein, 27 aa, Artificial Sequence
  fibritin_foldon_domain_Enterobacteria_phage_T4T_GI:299780356
GYIPEAPRDGQAYVRKDGEWVLLSTFL

SEQ ID NO: 1123 - protein, 29 aa, Artificial Sequence
  gi|228311799|pdb|2KBL|A Chain A, Nmr Structure Of A Monomeric Folding Intermediate Reveals The Structural Basis For Rapid Assembly Of An Evolutionary Optimized Trimerization Module
GSGYIPRAPRDGQAYVRKDGEWVLLSTFL

SEQ ID NO: 1124 - protein, 192 aa, Artificial Sequence
  gi|7021458|gb|AAF35357.1| vif [Human immunodeficiency virus 1]
MENRWQVMIVWQVDRMRIKTWKSLVKHHMYISKKAKEWVYRHHYESTHPRISSEVHIPLGDAKLVITTYWGLHTGEREWHLGQGVSIEWRKKRYNTQVDPDLADKLIHLHYFDCFSDSAIRHAILGHRVRPKCEYQAGHNKVGSLQYLALTALITPKKIKPPLPSVRKLTEDRWNKPQKTKGHRGSHTMNGH

SEQ ID NO: 1125 - protein, 215 aa, Artificial Sequence
  gi|726196|gb|AAA64577.1| viral infectivity factor [Human immunodeficiency virus 2]
MEEGERWIVVPTWRVPGRMEKWHSLVKYLKHRTKDLEGVCYVPHHKVGWAWWTCSRVIFPLQGNSHLEIQAYWNLTPEKGWLSSYAVRITWYTERFWTDVTPDCADSLIHSTYFSCFTAGEVRRAIRGEKLLSCCNYPQAHRSKVPLLQFLALVVVQQNGRPQKNSTTRKRWRSNYWRGFRLARKDGRGHKQRGSEPPASGAYFPGVAKVLEILA

SEQ ID NO: 1126 - protein, 221 aa, Artificial Sequence
  gi|294963|gb|AAA74708.1| viral infectivity factor [Simian immunodeficiency virus]
MEKEWIVVPTWRMTPRQIDRLQHIIKTHKYKSKELEKATYKHHYQIEWQWYTYCQWTIPVGDGTIWITFYHNLAPERGWLHMQGIRIQYQWNQWNTDLTPAVADRLIHNFYFPCFTARAVNQAVRGELLTSHCWTPHTDQVPSLQYLALQVYLKDGGGFLQSLPACARNTMVLHSKKCRVDPKRDQCHCKGRTGSDRSIQAFYSSRNIWSLESILKRRGRD

SEQ ID NO: 1127 - protein, 27 aa, Artificial Sequence
  GCN4pII_trimerization
MKQIEDKIEEIESKQKKIENEIARIKK

SEQ ID NO: 1128 - protein, 80 aa, Artificial Sequence
  gi|13096661|pdb|1DXS|A Chain A, Crystal Structure Of The C-Terminal Sterile Alpha Motif (Sam) Domain Of Human P73 Alpha Splice Variant
GSYHADPSLVSFLTGLGCPNCIEYFTSQGLQSIYHLQNLTIEDLGALKIPEQYRMTIWRGLQDLKQGHDYSTAQQLLRSS

SEQ ID NO: 1129 - protein, 68 aa, Artificial Sequence
  SAM-domain_SMART_accession:SM0054
PDYTTFPTVSDWLEAIKMGQYQENFLSAGFTSFHLVAQMTAEDLLRIGVTLAGHQKKLLNSVQDMRLQ

SEQ ID NO: 1130 - protein, 59 aa, Artificial Sequence
  gi|731187765|pdb|4CGC|C Chain C, Crystal Structure Of The Trimerization Domain Of Human Eml4
  misc_feature (33)..(33): Xaa can be any naturally occurring amino acid
GSLDDSISAASTSDVQDRLSALESRVQQQEDEXTVLKAALADVLRRLAISEDHVASVKK

SEQ ID NO: 1131 - protein, 51 aa, Artificial Sequence
  gi|731187760|pdb|4CGB|D Chain D, Crystal Structure Of The Trimerization Domain Of Eml2
GSGMEVDDRVSALEQRLQLQEDELAVLKAALADALRRLRACEEQGAALRAR

SEQ ID NO: 1132 - protein, 33 aa, Artificial Sequence
  gi|554793443|pdb|4HLR|A Chain A, Structural Determinants Of Trimerization Specificity In Hiv-1 Gp41 Protein
EAQQHLLQLTVWGLKQIQARILAVERYLKDQQL

SEQ ID NO: 1133 - protein, 456 aa, Artificial Sequence
  gi|524039134|emb|CCY19874.1| beta-galactosidase trimerization domain protein [Bifidobacterium adolescentis CAG:119]
MDYRRFQSQAQLACYTNERDAIREYDATTPITTNLMGTFKDLDYFEWAKEMDVVSWDNYPGMDTPPSFTAMCHDLMRGIGGNKPFMLMEQTPNQQNWFPFCKVKQPGEVRKLSWQAVAHGADTVRFFQMKQSLGGCERFHGAVIAHDGTEESRVFKETAALGEELDRIGRRIMGSRIESRVAIMFDWQSYWSLEGCVGPTTGFNYPNEVHRFYRALWRRNVPVDMIASTTPLARLSQYDLAIAPALITVLPGVAETLEAYVADGGTFITGYMAGIHDEHDLVVPGGYPGKLRRLMGVWVEEIDALAPGETIEVHGGTVDAKGEIVASIIHREGAERLATYGGDEFYAGHSALTVNAYGKGKAYFVGTPLDETGMSAFMAPIIKELDLKSLDTPEDVSLSVRYGDGGTRYAFLINNSAADKRLCLSELNGGTELLTGTVINDLIELKPYGVDVIALR

SEQ ID NO: 1134 - protein, 125 aa, Artificial Sequence
  gi|374414519|pdb|3QIL|X Chain X, Crystal Structure Analysis Of The Clathrin Trimerization Domain
MGSSHHHHHHSSGLVPRGSHMWKQSVELAKKDSLYKDAMQYASESKDTELAEELLQWFLQEEKRECFGACLFTCYDLLRPDVVLELAWRHNIMDFAMPYFIQVMKEYLTKVDKLDASESLRKEEE

SEQ ID NO: 1135 - protein, 53 aa, Artificial Sequence
  gi|491668176|pdb|3UIA|C Chain C, Structural Determinants Of Trimerization Specificity In Hiv-1 Gp41 Protein
QARQLLSGIVQQQNNLLRAIEAQQHLLQLTVWGLKQIQARILAVERYLKDQQL

SEQ ID NO: 1136 - protein, 117 aa, Artificial Sequence
  gi|456967028|gb|EMG08478.1| beta-galactosidase trimerization domain protein [Leptospira interrogans serovar Grippotyphosa str. LT2186]
MATWFSGMNVLNVNTHFRPASKIDFKDYKIIILPMYTMVNETVFKRLEEFVREGGTLVLGFRTGAKDLNGWMYDSQIPGPFAEMAGIKIRKFESVGNQKVKFRFVFFRELVLKFVKF

SEQ ID NO: 1137 - protein, 56 aa, Artificial Sequence
  gi|255917967|pdb|3HSH|F Chain F, Crystal Structure Of Human Collagen Xviii Trimerization Domain (Tetragonal Crystal Form)
GSSGVRLWATRQAMLGQVHEVPEGWLIFVAEQEELYVRVQNGFRKVQLEARTPLPR

SEQ ID NO: 1138 - protein, 54 aa, Artificial Sequence
  gi|309319975|pdb|3N3F|B Chain B, Crystal Structure Of The Human Collagen Xv Trimerization Domain: A Potent Trimerizing Unit Common To Multiplexin Collagens
NLVTAFSNMDDMLQKAHLVIEGTFIYLRDSTEFFIRVRDGWKKLQLGELIPIPA

SEQ ID NO: 1139 - protein, 29 aa, Artificial Sequence
  gi|228311799|pdb|2KBL|A Chain A, Nmr Structure Of A Monomeric Folding Intermediate Reveals The Structural Basis For Rapid Assembly Of An Evolutionary Optimized Trimerization Module
GSGYIPRAPRDGQAYVRKDGEWVLLSTFL

SEQ ID NO: 1140 - protein, 40 aa, Artificial Sequence
  gi|159162679|pdb|1M7L|C Chain C, Solution Structure Of The Coiled-Coil Trimerization Domain From Lung Surfactant Protein D
GLPDVASLRQQVEALQGQVQHLQAAFSQYKKVELFPNGGI

SEQ ID NO: 1141 - protein, 118 aa, Artificial Sequence
  gi|33356923|pdb|1G2X|C Chain C, Sequence Induced Trimerization Of Krait Pla2: Crystal Structure Of The Trimeric Form Of Krait Pla2
NLQQFKNMIQCAGTRTWTAYINYGCYCGKGGSGTPVDKLDRCCYTHDHCYNQADSIPGCNPNIKTYSYTCTQPNITCTRTADACAKFLCDCDRTAAICFASAPYNINNIMISASNSCQ

SEQ ID NO: 1142 - protein, 37 aa, Artificial Sequence
  gi|4699809|pdb|1CE0|C Chain C, Trimerization Specificity In Hiv-1 Gp41: Analysis With A Gcn4 Leucine Zipper Model
RLLQRIKQQEDKLEETLSKIYHLENEIARVKKLLGER

SEQ ID NO: 1143 - protein, 181 aa, Artificial Sequence
  gi|21465967|pdb|1L1O|F Chain F, Structure Of The Human Replication Protein A (Rpa) Trimerization Core
GGSNTNWKTLYEVKSENLGQGDKPDYFSSVATVVYLRKENCMYQACPTQDCNKKVIDQQNGLYRCEKCDTEFPNFKYRMILSVNIADFQENQWVTCFQESAEAILGQNAAYLGELKDKNEQAFEEVFQNANFRSFIFRVRVKVETYNDESRIKATVMDVKPVDYREYGRRLVMSIRRSALM

SEQ ID NO: 1144 - protein, 128 aa, Artificial Sequence
  gi|21465966|pdb|1L1O|E Chain E, Structure Of The Human Replication Protein A (Rpa) Trimerization Core
QHIVPCTISQLLSATLVDEVFRIGNVEISQVTIVGIIRHAEKAPTNIVYKIDDMTAAPMDVRQWVDTDDTSSENTVVPPETYVKVAGHLRSFQNKKSLVAFKIMPLEDMNEFTTHILEVINAHMVLSK

SEQ ID NO: 1145 - protein, 121 aa, Artificial Sequence
  gi|21465965|pdb|1L1O|D Chain D, Structure Of The Human Replication Protein A (Rpa) Trimerization Core
MVDMMDLPRSRINAGMLAQFIDKPVCFVGRLEKIHPTGKMFILSDGEGKNGTIELMEPLDEEISGIVEVVGRVTAKATILCTSYVQFKEDSHPFDLGLYNEAVKIIHDFPQFYPLGIVQHD

SEQ ID NO: 1146 - protein, 30 aa, Artificial Sequence
  gi|545102|gb|AAC60746.1| p53 [Xenopus laevis]_tetramerization_domain
EEIFTLRIKGRSRYEMIKKLNDALELQESL

SEQ ID NO: 1147 - protein, 31 aa, Artificial Sequence
  gi|5421828|dbj|BAA82343.1| p53 [Mus musculus]_tetramerization_domain
GEYFTLKIRGRKRFEMFRELNEALELKDAHA

SEQ ID NO: 1148 - protein, 31 aa, Artificial Sequence
  GCN4-pLI_tetramerization
MKQIEDKLEEILSKLYHIENELARIKKLLGE

SEQ ID NO: 1149 - protein, 31 aa, Artificial Sequence
  gi|23491729|dbj|BAC16799.1| P53_tetramerization_domain [Homo sapiens]
GEYFTLQIRGRERFEMFRELNEALELKDAQA

SEQ ID NO: 1150 - protein, 170 aa, Artificial Sequence
  vWF_typeD-domain_MUC5_HUMAN
DGCCITTSASVCAAAGVTPTTSPSTAPTTPSWTTARTLGAADCARVWPLPRARRQLLLRCGGRALLPEVHHPGVPPGPRGADPQASPRGVDKRDHLQQQGGQPRLPKNGIVVSRIGVKMYATIPELGVQVMFSGLIFSVEVPFSKFANNTEGQCGTCTNDRKDECRTPRG

SEQ ID NO: 1151 - protein, 165 aa, Artificial Sequence
  vWF_typeD-domain_MUC2_HUMAN
WVCKDLPCPGTCALEGGSHITTFDGKTYTFHGDCYYVLAKGDHNDSYALLGELAPCGSTDKQTCLKTVVLLADKKKNAVVFKSDGSVLLNQLQVNLPHVTASFSVFRPSSYHIMVSMAIGVRLQVQLAPVMQLFVTLDQASQGQVQGLCGNFNGLEGDDFKTASG

SEQ ID NO: 1152 - protein, 167 aa, Artificial Sequence
  non-heme Ferritin_helicobacter_pylori_N19Q
MLSKDIIKLLNEQVNKEMQSSNLYMSMSSWCYTHSLDGAGLFLFDHAAEEYEHAKKLIIFLNENNVPVQLTSISAPEHKFEGLTQIFQKAYEHEQHISESINNIVDHAIKSKDHATFNFLQWYVAEQHEEEVLFKDILDKIELIGNENHGLYLADQYVKGIAKSRKS

SEQ ID NO: 1153 - protein, 163 aa, Artificial Sequence
  ferritin_HELPY(J99)-pfr(5-167,N19Q)
DIIKLLNEQVNKEMQSSNLYMSMSSWCYTHSLDGAGLFLFDHAAEEYEHAKKLIIFLNENNVPVQLTSISAPEHKFEGLTQIFQKAYEHEQHISESINNIVDHAIKSKDHATFNFLQWYVAEQHEEEVLFKDILDKIELIGNENHGLYLADQYVKGIAKSRKS

SEQ ID NO: 1154 - protein, 181 aa, Artificial Sequence
  gi|614130155|sp|P9WNE5.1|BFRB_MYCTU RecName: Full=Ferritin BfrB AltName: Full=Non-heme ferritin Ftn AltName: Full=Nox19
MTEYEGPKTKFHALMQEQIHNEFTAAQQYVAIAVYFDSEDLPQLAKHFYSQAVEERNHAMMLVQHLLDRDLRVEIPGVDTVRNQFDRPREALALALDQERTVTDQVGRLTAVARDEGDFLGEQFMQWFLQEQIEEVALMATLVRVADRAGANLFELENFVAREVDVAPAASGAPHAAGGRL

SEQ ID NO: 1155 - protein, 181 aa, Artificial Sequence
  gi|302595668|sp|A0R647.1|BFRB_MYCS2 RecName: Full=Ferritin BfrB AltName: Full=Non-heme ferritin Ftn
MTNSGALDTKFHALIQDQIRSEFTASQQYIAIAVFFDGADLPQLAKHFYAQALEERNHAMMLVQYLLDRDVEVEIPGIDPVCNNFTTPRDALALALDQERTVTEQISRLASVARDEGDHLGEQFMQWFLKEQVEEVAAMTTLVRIADRAGSNLFHIEDFVAREMSAAGADPTAPRAAGGAL

SEQ ID NO: 1156 - protein, 159 aa, Artificial Sequence
  gi|322518589|sp|P0CJ83.1|FTN_BACFR RecName: Full=Bacterial non-heme ferritin
MISEKLQNAINEQISAEMWSSNLYLSMSFYFEREGFSGFAHWMKKQSQEEMGHAYAMADYIIKRGGIAKVDKIDVVPTGWGTPLEVFEHVFEHERHVSKLVDALVDIAAAEKDKATQDFLWGFVREQVEEEATAQGIVDKIKRAGDAGIFFIDSQLGQR

SEQ ID NO: 1157 - protein, 167 aa, Artificial Sequence
  gi|123775374|sp|Q49YT7.1|FTN_STAS1 RecName: Full=Bacterial non-heme ferritin
MLNKELLDALNEQMNHEFYAAHAYMAMAAFCDDNSYEGFANFYIQQAKEERFHGKKIYDYINDRGEHALFTAIPAPKTEFSSILETFEDGLAQEQDVTHRFYNLSDLANKDKDYATISFLNWFLDEQVEEEAMFETHIDYLNRIGDDSNTLYLYEKELAARSFDESE

SEQ ID NO: 1158 - protein, 156 aa, Artificial Sequence
  gi|114931|sp|P22759.2|BFR_AZOVI RecName: Full=Bacterioferritin Short=BFR AltName: Full=Cytochrome b-557.5
MKGDKIVIQHLNKILGNELIAINQYFLHARMYEDWGLEKLGKHEYHESIDEMKHADKLIKRILFLEGLPNLQELGKLLIGEHTKEMLECDLKLEQAGLPDLKAAIAYCESVGDYASRELLEDILESEEDHIDWLETQLDLIDKIGLENYLQSQMDE

SEQ ID NO: 1159 - protein, 159 aa, Artificial Sequence
  gi|54036795|sp|P63698.1|BFR_MYCBO RecName: Full=Bacterioferritin Short=BFR
MQGDPDVLRLLNEQLTSELTAINQYFLHSKMQDNWGFTELAAHTRAESFDEMRHAEEITDRILLLDGLPNYQRIGSLRIGQTLREQFEADLAIEYDVLNRLKPGIVMCREKQDTTSAVLLEKIVADEEEHIDYLETQLELMDKLGEELYSAQCVSRPPT

SEQ ID NO: 1160 - protein, 237 aa, Artificial Sequence
  SP-D_MmSftp4(20-256)
AEMKSLSQRSVPNTCTLVMCSPTENGLPGRDGRDGREGPRGEKGDPGLPGPMGLSGLQGPTGPVGPKGENGSAGEPGPKGERGLSGPPGLPGIPGPAGKEGPSGKQGNIGPQGKPGPKGEAGPKGEVGAPGMQGSTGAKGSTGPKGERGAPGVQGAPGNAGAAGPAGPAGPQGAPGSRGPPGLKGDRGVPGDRGIKGESGLPDSAALRQQMEALKGKLQRLEVAFSHYQKAALFPDG

SEQ ID NO: 1161 - protein, 152 aa, Artificial Sequence
  SP-D_MmSftp4(106-256)
PPGLPGIPGPAGKEGPSGKQGNIGPQGKPGPKGEAGPKGEVGAPGMQGSTGAKGSTGPKGERGAPGVQGAPGNAGAAGPAGPAGPQGAPGSRGPPGLKGDRGVPGDRGIKGESGLPDSAALRQQMEALKGKLQRLEVAFSHYQKAALFPDGR

SEQ ID NO: 1162 - protein, 374 aa, Artificial Sequence
  surfactant-D_mus_musculus_Gb_AAA92021.1
MLPFLSMLVLLVQPLGNLGAEMKSLSQRSVPNTCTLVMCSPTENGLPGRDGRDGREGPRGEKGDPGLPGPMGLSGLQGPTGPVGPKGENGSAGEPGPKGERGLSGPPGLPGIPGPAGKEGPSGKQGNIGPQGKPGPKGEAGPKGEVGAPGMQGSTGAKGSTGPKGERGAPGVQGAPGNAGAAGPAGPAGPQGAPGSRGPPGLKGDRGVPGDRGIKGESGLPDSAALRQQMEALKGKLQRLEVAFSHYQKAALFPDGRSVGDKIFRTADSEKPFEDAQEMCKQAGGQLASPRSATENAAIQQLITAHNKAAFLSMTDVGTEGKFTYPTGEPLVYSNWAPGEPNNNGGAENCVEIFTNGQWNDKACGEQRLVICEF

SEQ ID NO: 1163 - protein, 375 aa, Artificial Sequence
  surfactant-D_human_P35247.3
MLLFLLSALVLLTQPLGYLEAEMKTYSHRTMPSACTLVMCSSVESGLPGRDGRDGREGPRGEKGDPGLPGAAGQAGMPGQAGPVGPKGDNGSVGEPGPKGDTGPSGPPGPPGVPGPAGREGPLGKQGNIGPQGKPGPKGEAGPKGEVGAPGMQGSAGARGLAGPKGERGVPGERGVPGNTGAAGSAGAMGPQGSPGARGPPGLKGDKGIPGDKGAKGESGLPDVASLRQQVEALQGQVQHLQAAFSQYKKVELFPNGQSVGEKIFKTAGFVKPFTEAQLLCTQAGGQLASPRSAAENAALQQLVVAKNEAAFLSMTDSKTEGKFTYPTGESLVYSNWAPGEPNDDGGSEDCVEIFTNGKWNDRACGEKRLVVCEF

SEQ ID NO: 1164 - protein, 111 aa, Artificial Sequence
  gi|77632635|gb|ABB00297.1| Phosphoprotein protein [Sendai virus]_multimerizationDomain
SSMKEMATLLKSLGVIQSAQEFESSRDASYVFARRALKSANYAEMTFNVCGLILSAEKSFANRVDENKQLLKQIQESVESFRDIYKRFSEYQKEQNSLLMSNLSTLHIITD

SEQ ID NO: 1165 - protein, 108 aa, Artificial Sequence
  gi|313476290|emb|CBM41031.1| phosphoprotein [Nipah virus] _multimerizationDomain
NSLDDKYIMPSDDFSNTFFPHDTDRLNYHADHLGDYDLETLCEESVLMGVINSIKLINLDMRLNHIEEQVKEIPKIINKLESIDRVLAKTNTALSTIEGHLVSMMIMI

SEQ ID NO: 1166 - protein, 57 aa, Artificial Sequence
  gi|190502|gb|AAA36507.1| C4b-binding protein alpha chain_oligomerization domain [Homo sapiens]
ETPEGCEQVLTGKRLMQCLPNPEDVKMALEVYKLSLEIEQLELQRDSARQSTLDKEL

SEQ ID NO: 1167 - protein, 54 aa, Artificial Sequence
  gi|115430101|ref|NP_031602.3| C4b-binding protein precursor [Mus musculus]_oligomerization domain
EASEDLKPALTGNKTMQYVPNSHDVKMALEIYKLTLEVELLQLQIQKEKHTEAH

SEQ ID NO: 1168 - protein, 149 aa, Artificial Sequence
  Hepatitis B virus core antigen cAg of woodchuck (WhcAg), WhcAg
DIDPYKEFGSSYQLLNFLPLDFFPDLNALVDTATALYEEELTGREHCSPHHTAIRQALVCWDELTKLIAWMSSNITSEQVRTIIVNHVNDTWGLKVRQSLWFHLSCLTFGQHTVQEFLVSFGVWIRTPAPYRPPNAPILSTLPEHTVIC

SEQ ID NO: 1169 - protein, 188 aa, Artificial Sequence
  gi|62288031|sp|P69709.1|CAPSD_WHV1 RecName: Full=Capsid protein
MDIDPYKEFGSSYQLLNFLPLDFFPDLNALVDTATALYEEELTGREHCSPHHTAIRQALVCWDELTKLIAWMSSNITSEQVRTIIVNHVNDTWGLKVRQSLWFHLSCLTFGQHTVQEFLVSFGVWIRTPAPYRPPNAPILSTLPEHTVIRRRGGARASRSPRRRTPSPRRRRSQSPRRRRSQSPSANC

SEQ ID NO: 1170 - protein, 57 aa, Artificial Sequence
  gi|114054630|gb|ABI49990.1| HBsAg, partial [Hepatitis B virus]
STTSTGPCRTCTTTAQGTSMYPSCCCTKPSDGNCTCIPIPSSWAFGKFLWEWASARF

SEQ ID NO: 1171 - protein, 400 aa, Artificial Sequence
  gi|18252577|gb|AAL66340.1|AF461363_4 HBsAg [Hepatitis B virus]
MGGWSSKPRQGMGTNLSVPNPLGFFPDHQLDPAFGANSNNPDWDFNPNKDHWPEANQVGAGAFGPGFTPPHGGLLGWSPQAQGILTTVPVAPPPASTNRQSGRQPTPISPPLRDSHPQAMQWNSTTFHQALLDPRVRGLYFPAGGSSSGTVNPVPTTASPISSIFSRTGDPAPNMESTTSGFLGPLLVLQAGFFLLTRILTIPQSLDSWWTSLNFLGGAPTCPGQNSQSPTSNHSPTSCPPICPGYRWMCLRRFIIFLFILLLCLIFLLVLLDYQGMLPVCPLLPGTSTTSTGPCKTCTSPAQGTSMFPSCCCTKPSDGNCTCIPIPSSWAFARFLWEWASVRFSWLSLLVPFVQWFVGLSPTVWLSVIWMMWYWGPCLYNILSPFLPLLPIFFCLWVYI

SEQ ID NO: 1172 - protein, 226 aa, Artificial Sequence
  gi|758329959|gb|AJO67747.1| small S protein
MDNITSGLLGPLLVLQAVSFLLIKILTIPQSLDSWWTSLNFLGELPGCPGQNSQSPTSNHLPTSCPPTCPGYRWMCLRRFIIFLFILLLCLIFLLVLLDYQGMLPVCPLLPGSTTTSTGPCKTCTTLAQGTSMFPSCCCTKPSDGNCTCIPIPSSWALGKYLWEWASARFSWLSLLVQFVQWCVGLSPTVWLLVIWMIWYWGPNLCSILSPFIPLLPIFCYLWVSI

SEQ ID NO: 1173 - protein, 218 aa, Artificial Sequence
  gi|541129163|gb|AGV15827.1| CP [Alfalfa mosaic virus]
MSSSQKKAGGKAGKPTKRSQNYAALRKAQLPKPPALKVPVVKPTNTILPQTGCVWQSLGTPLSLSSFNGLGVRFLYSFLKDFAGPRILEEDLIYRMVFSITPSHAGTFCLTDDVTTEDGRAVAHGNPMQEFPQGVFHANEKFGFELVFTAPTHAGMQNQNFKHSYAVALCLDFDAQPEGSKNPSYRFNEVWVERKAFPRAGPLRSLITVGLLDEADDL

SEQ ID NO: 1174 - protein, 540 aa, Artificial Sequence
  gi|747744524|dbj|BAQ20804.1| capsid [Norovirus Hu/GII.4/Aichi352-14/2014]
MKMASSDANPSDGSAANLVPEVNNEVMALEPVVGAAIAAPVAGQQNVIDPWIRNNFVQAPGGEFTVSPRNAPGEILWSAPLGPDLNPYLSHLARMYNGYAGGFEVQVILAGNAFTAGKVIFAAVPPNFPTEGLSPSQVTMFPHIVVDVRQLEPVLIPLPDVRNNFYHYNQSNDPTIKLIAMLYTPLRANNAGDDVFTVSCRVLTRPSPDFDFIFLVPPTGESRTKPFSVPVLTVEEMTNSRFPIPLEKLFTGPSSAFVVQPQNGRCTTDGVLLGTTQLSPVNICTFRGDVTHTTGSHNYTMNLASQNWNNYDPTEEIPAPLGTPDFVGKIQGMLTQTTRTDGSTRGHKATVYTGSADFAPKLGRVQFGTDTDHDLEANQNTKFTPVGVIQDGSTTHRNEPQQWVLPSYSGRNTPNVHLAPAVAPTFPGEQLLFFRSTMPGCSGYPNMDLDCLLPQEWVQYFYQEAAPAQSDVALLRFVNPDTGRVLFECKLHKSGYVTVAHTGQHDLVIPPNGYFRFDSWVNQFYTLAPMGNGTGRRRAL

SEQ ID NO: 1175 - protein, 161 aa, Artificial Sequence
  P Domain Of Norovirus]
QNTKFTPVGVIQDGNNHQNEPQQWVLPNYSGRTGHNVHLAPAVAPTFPGEQLLFFRSTMPGCSGYPNMNLDCLLPQEWVQHFYQEAAPAQSDVALLRFVNPDTGRVLFECKLHKSGYVTVAHTGPHDLVIPPNGYFRFDSWVNQFYTLAPMGNGAGRRRAL

SEQ ID NO: 1176 - protein, 150 aa, Artificial Sequence
  gi|392495367|gb|AFM74333.1| L1 protein, partial [Human papillomavirus type 11]
AQGHNNGICWGNHLFVTVVDTTRSTNMTLCASVSKSATYTNSDYKEYMRHVEEFDLQFIFQLCSITLSAEVMAYIHTMNPSVLEDWNFGLSPPPNGTLEDTYRYVQSQAITCQKPTPEKEKQDPYKDMSFWEVNLKEKFSSELDQFPLGR

SEQ ID NO: 1177 - protein, 140 aa, Artificial Sequence
  gi|194595638|gb|ACF77101.1| L1 protein, partial [Human papillomavirus type 16]
NGICWGNQLFVTVVDTTRSTNMSLCAAISTSETTYKNTNFKEYLRHGEEYDLQFIFQLCKITLTADVMTYIHSMNSTILEDWNFGLQPPPGGTLEDTYRFVTSQAIACQKHTPPAPKEDPLKKYTFWEVNLKEKFSADLD

SEQ ID NO: 1178 - protein, 541 aa, Artificial Sequence
  gi|575527317|gb|AHG99484.1| L2 [Human papillomavirus]
MNGNKRTKRDAVENLYRTCRISGNCPPDVVNKVERKTLADILLQAFSSVLYLGGLGIGTGKGNVGVRPIPEIPSIETSVEIPSGTNRVEEIPLTDLATKPTRPTTTIRTQERPFSVPIDRIGAGFRPKDPTGIRPIDVIDPASPSVITLQEGLPDTIITIGEPNLETGESILNNLDIITDTTSIRSHPTVFQDVTNQLAILTVTPAEPPATEVVFSVLEEPIDPFVTLQSVAGHVDPTINIFVDPNLTGDDIILGEEIPLEPINPRLDFDIEEPPHVSTPEQRIQRAFSRARQFYRQHIQQVRTSNLNLLGDVSRAIQFGFENPAFEPEVTLEFEKDISTIEAAPDIDFTDVQKISRPYFSETPEGTIRVSRLAERAGMRTRSGTVLSQTMHYYYDISKIPFVEEIELAPLSETLESPFIENPEAESIFVDELNIDPDDVLMDTYNDDFSSAHLIFNTVETEEDIVTYPTLVSDVGLRTLPTLSDIFISEQNLNADTTFNIPRVPIIPVQPALGTIVQSFDFYLHPSLRKKKRKRKKIYYF

SEQ ID NO: 1179 - protein, 742 aa, Artificial Sequence
  gi|112379656|gb|ABI16639.1| VP1 [Adeno-associated virus 12]
MAADGYLPDWLEDNLSEGIREWWALKPGAPQPKANQQHQDNGRGLVLPGYKYLGPFNGLDKGEPVNEADAAALEHDKAYDKQLEQGDNPYLKYNHADAEFQQRLATDTSFGGNLGRAVFQAKKRILEPLGLVEEGVKTAPGKKRPLEKTPNRPTNPDSGKAPAKKKQKDGEPADSARRTLDFEDSGAGDGPPEGSSSGEMSHDAEMRAAPGGNAVEAGQGADGVGNASGDWHCDSTWSEGRVTTTSTRTWVLPTYNNHLYLRIGTTANSNTYNGFSTPWGYFDFNRFHCHFSPRDWQRLINNNWGLRPKSMRVKIFNIQVKEVTTSNGETTVANNLTSTVQIFADSTYELPYVMDAGQEGSFPPFPNDVFMVPQYGYCGVVTGKNQNQTDRNAFYCLEYFPSQMLRTGNNFEVSYQFEKVPFHSMYAHSQSLDRMMNPLLDQYLWHLQSTTTGNSLNQGTATTTYGKITTGDFAYYRKNWLPGACIKQQKFSKNANQNYKIPASGGDALLKYDTHTTLNGRWSNMAPGPPMATAGAGDSDFSNSQLIFAGPNPSGNTTTSSNNLLFTSEEEIATTNPRDTDMFGQIADNNQNATTAPHIANLDAMGIVPGMVWQNRDIYYQGPIWAKVPHTDGHFHPSPLMGGFGLKHPPPQIFIKNTPVPANPNTTFSAARINSFLTQYSTGQVAVQIDWEIQKEHSKRWNPEVQFTSNYGTQNSMLWAPDNAGNYHELRAIGSRFLTHHL

SEQ ID NO: 1180 - protein, 580 aa, Artificial Sequence
  gi|224384440|gb|ACN42941.1| VP2 [Adeno-associated virus - Po1]
MAAKGERIDDHYPKKKKARIEETEAGTSGAQQLQIPAQPASSLGADTMSAGGGSPLGDNNQGADGVGNASGDWHCDSTWMGDRVITKSTRTWVLPSYNNHQYLEIHSGSVDGSNANAYFGYSTPWGYFDFNRFHSHWSPRDWQRLVNNYWGFRPRSLKVKIFNIQVKEVTTQDGTTTIANNLTSTVQVFTDNDYQLPYVIGNGTEGCLPAFPPQVFTLPQYGYATLNRNNTDDPTERSSFFCLEYFPSKMLRTGNNFEFTYSFEEVPFHCSFAPSQNLFKLANPLVDQYLYRFVSTDTSGNLQFQKNLKARYANTYKNWFPGPMCRTQGWYTSAGTYNNKGVANFDTSNKMELEGASYQVNPQPNGMTNTLQDSNKYALENTMIFNAQNAPPGTTSLYQENNLLITSESETQPVNRLAYNTGGQVSNNNQNSNTHPTVGVYNHQEVLPGSVWMDRDVYLQGPIWAKIPETGAHFHPSPAMGGFGLKHPPPMMLIKNTPVPSNVAAFSDVPVKSFITQYSTGQVTVEIEWELKKENSKRWNPEIQYTNNYNNPTFVDFAPDTSGEYRTTRAIGTRYLTRPL

SEQ ID NO: 1181 - protein, 533 aa, Artificial Sequence
  gi|224384441|gb|ACN42942.1| VP3 [Adeno-associated virus - Po1]
MSAGGGSPLGDNNQGADGVGNASGDWHCDSTWMGDRVITKSTRTWVLPSYNNHQYLEIHSGSVDGSNANAYFGYSTPWGYFDFNRFHSHWSPRDWQRLVNNYWGFRPRSLKVKIFNIQVKEVTTQDGTTTIANNLTSTVQVFTDNDYQLPYVIGNGTEGCLPAFPPQVFTLPQYGYATLNRNNTDDPTERSSFFCLEYFPSKMLRTGNNFEFTYSFEEVPFHCSFAPSQNLFKLANPLVDQYLYRFVSTDTSGNLQFQKNLKARYANTYKNWFPGPMCRTQGWYTSAGTYNNKGVANFDTSNKMELEGASYQVNPQPNGMTNTLQDSNKYALENTMIFNAQNAPPGTTSLYQENNLLITSESETQPVNRLAYNTGGQVSNNNQNSNTHPTVGVYNHQEVLPGSVWMDRDVYLQGPIWAKIPETGAHFHPSPAMGGFGLKHPPPMMLIKNTPVPSNVAAFSDVPVKSFITQYSTGQVTVEIEWELKKENSKRWNPEIQYTNNYNNPTFVDFAPDTSGEYRTTRAIGTRYLTRPL

SEQ ID NO: 1182 - protein, 131 aa, Artificial Sequence
  gi|13449258|ref|NP_085472.1| coat protein [Acinetobacter phage AP205]
MANKPMQPITSTANKIVWSDPTRLSTTFSASLLRQRVKVGIAELNNVSGQYVSVYKRPAPKPEGCADACVIMPNENQSIRTVISGSAENLATLKAEWETHKRNVDTLFASGNAGLGFLDPTAAIVSSDTTA

SEQ ID NO: 1183 - protein, 901 aa, Artificial Sequence
  gi|873241583|gb|AKP24183.1| VP3 [Bluetongue virus 1]
MAAQNEQRPERIKTTPYLEGDVLSSDSGPLLSVFALQEIMQKVRQVQADYMTATREVDFTVPDVQKILDDIKALAAEQVYKIVKVPSISFRHIVMQSRDRVLRVDTYYEEMSQVGDVITEDEPEKFYSTIIKKVRFIRGKGSFILHDIPTRDHRGMEVAEPEVLGVEFKNVLPVLTAEHRAMIQNALDGSIIENGNVATRDVDVFIGACSEPVYRIYNRLQGYIEAVQLQELRNSIGWLERLGHRKRITYSQEVLTDFRRQDTIWVLALQLPVNPQVVWDVPRSSIANLIMNIATCLPTGEYIAPNPRISSITLTQRITTTGPFAILTGSTPTAQQLNDVRKIYLALMFPGQIILDLKIDPGERMDPAVRMVAGVVGHLLFTAGGRFTNLTQNMARQLDIALNDYLLYMYNTRVQVNYGPTGEPLDFQIGRNQYDCNVFRADFATGTGYNGWATIDVEYREPAPYVHAQRYIRYCGIDSRELINPTTYGIGMTYHCYNEMLRMLVAAGKDSEAAYFRSMLPFHMVRFARINQIINEDLHSVFSLPDDMFNALLPDLIAGAHQNADPVVLDVSWISLWFAFNRSFEPTHRNEMLEVAPLIESVYASELSVMKVDMRHLSLMQRRFPDVLIQARPSHFWKAVLNDSPEAVKAVMNLSHSHNFINIRDMMRWVMLPSLQPSLKLALEEEAWAAANDFEDLMLTDQVYMHRDMLPEPRLDDIERFRQEGFYYTNMLEAPPEIDRVVQYTYEIARLQANMGQFRAALRRIMDDDDWVRFGGVLRTVRVKFYDARPPDDVLQGLPFSYDTNERGGLAYATIKYATETTIFYLIYNVEFSNTPDSLVLINPTYTMTKVFINKRIVERVRVGQILAVLNRRFVAYKGKMRIMDITQSLKMGTKLAAPTV

SEQ ID NO: 1184 - protein, 349 aa, Artificial Sequence
  gi|349502689|gb|AEP83826.1| VP7 [Bluetongue virus]
MDTIAARALTVMRACATLQEARIVLEANVMEILGIAINRYNGLTLRGVTMRPTSLAQRNEMFFMCLDMMLSAAGINVGPISPDYTQHMATIGVLATPEIPFTTEAANEIARVTGETSTWGPARQPYGFFLETEEVYQPGRWFMRAAQVVTPVVCGPDMIQVSLNAGARGDVQQIFQGRNDPMMIYLVWRRIENFSMPQGNSQRTLAGVTVSVGGVDMRAGRIIAWDGQAVLQIHNPTQQNAMVQIQVVFYISMDKTLNQYPALTAEIFNVYSFRDHTWHGLRTAILNRTTLPNMLPPIFPPNDRDSILTILLLSTLADVYSVLRPEFAIHGVNPMPGPLTRAIARAAYA

SEQ ID NO: 1185 - protein, 189 aa, Artificial Sequence
  gi|331500|gb|AAA46334.1| coat protein [Brome mosaic virus]
MSTSGTGKMTRAQRRAAARRNRWTARVQPVIVEPLAAGQGKAIKAIAGYSISKWEASSDAITAKATNAMSITLPHELSSEKNKELKVGRVLLWLGLLPSVAGRIKACVAEKQAQAEAAFQVALAVADSSKEVVAAMYTDAFRGATLGDLLNLQIYLYASEAVPAKAVVVHLEVEHVRPTFDDFFTPVYR

SEQ ID NO: 1186 - protein, 343 aa, Artificial Sequence
  gi|223019777|dbj|BAH22432.1| VP1 [Budgerigar fledgling disease polyomavirus]
MSQKGKGSCPRPQQVPRLLVKGGIEVLDVKSGPDSITTIEAYLQPRPGQKNGYSTVITVQAEGYQDAPHSTEVPCYSCARIPLPTINDDITCPTLLMWEAVSVKTEVVGVSSILNMHSGAFRAFNGYGGGYTICGPRIHFFSVGGEPLDLQACMQNSKTVYPAPLIGPGEGERRETAQVLDTGYKARLDKDGLYPIECWCPDPAKNENTRYYGNLTGGPETPPVLAFTNTTTTILLDENGVGPLCKGDGLFLSAADVAGTYVDQRGRQYWRGLPRYFSIQLRKRNVRNPYPVSGLLNSLFNDLMPRMTGQSMQGSDAQVEEVRVYEGMEGLAPEIDMPPKAPR

SEQ ID NO: 1187 - protein, 1248 aa, Artificial Sequence
  gi|341942186|sp|Q8JUX5.3|POLS_CHIKS RecName: Full=Structural polyprotein
MEFIPTQTFYNRRYQPRPWTPRPTIQVIRPRPRPQRQAGQLAQLISAVNKLTMRAVPQQKPRRNRKNKKQKQKQQAPQNNTNQKKQPPKKKPAQKKKKPGRRERMCMKIENDCIFEVKHEGKVTGYACLVGDKVMKPAHVKGTIDNADLAKLAFKRSSKYDLECAQIPVHMKSDASKFTHEKPEGYYNWHHGAVQYSGGRFTIPTGAGKPGDSGRPIFDNKGRVVAIVLGGANEGARTALSVVTWNKDIVTKITPEGAEEWSLAIPVMCLLANTTFPCSQPPCIPCCYEKEPEETLRMLEDNVMRPGYYQLLQASLTCSPHRQRRSTKDNFNVYKATRPYLAHCPDCGEGHSCHSPVALERIRNEATDGTLKIQVSLQIGIGTDDSHDWTKLRYMDNHIPADAGRAGLFVRTSAPCTITGTMGHFILARCPKGETLTVGFTDSRKISHSCTHPFHHDPPVIGREKFHSRPQHGKELPCSTYVQSNAATAEEIEVHMPPDTPDRTLLSQQSGNVKITVNGRTVRYKCNCGGSNEGLITTDKVINNCKVDQCHAAVTNHKKWQYNSPLVPRNAELGDRKGKIHIPFPLANVTCMVPKARNPTVTYGKNQVIMLLYPDHPTLLSYRSMGEEPNYQEEWVTHKKEVVLTVPTEGLEVTWGNNEPYKYWPQLSANGTAHGHPHEIILYYYELYPTMTVVVVSVASFILLSMVGMAVGMCMCARRRCITPYELTPGATVPFLLSLICCIRTAKAATYQEAAVYLWNEQQPLFWLQALIPLAALIVLCNCLRLLPCCCKTLAFLAVMSIGAHTVSAYEHVTVIPNTVGVPYKTLVNRPGYSPMVLEMELLSVTLEPTLSLDYITCEYKTVIPSPYVKCCGTAECKDKNLPDYSCKVFTGVYPFMWGGAYCFCDAENTQLSEAHVEKSESCKTEFASAYRAHTASASAKLRVLYQGNNITVTAYANGDHAVTVKDAKFIVGPMSSAWTPFDNKIVVYKGDVYNMDYPPFGAGRPGQFGDIQSRTPESKDVYANTQLVLQRPAAGTVHVPYSQAPSGFKYWLKERGASLQHTAPFGCQIATNPVRAMNCAVGNMPISIDIPDAAFTRVVDAPSLTDMSCEVPACTHSSDFGGVAIIKYAVSKKGKCAVHSMTNAVTIREAEIEVEGNSQLQISFSTALASAEFRVQVCSTQVHCAAECHPPKDHIVNYPASHTTLGVQDISATAMSWVQKITGGVGLVVAVAALILIVVLCVSFSRH

SEQ ID NO: 1188 - protein, 190 aa, Artificial Sequence
  gi|331603|gb|AAA46370.1| viral coat protein [Cowpea chlorotic mottle virus]
MSTVGTGKLTRAQRRAAARKNKRNTRVVQPVIVEPIASGQGKAIKAWTGYSVSKWTASCAAAEAKVTSAITISLPNELSSERNKQLKVGRVLLWLGLLPSVSGTVKSCVTETQTTAAASFQVALAVADNSKDVVAAMYPEAFKGITLEQLAADLTIYLYSSAALTEGDVIVHLEVEHVRPTFDDSFTPVY

SEQ ID NO: 1189 - protein, 326 aa, Artificial Sequence
  gi|824038301|gb|AKI82619.1| VP40 [Zaire ebolavirus]
MRRVILPTAPPEYMEAIYPARSNSTIARGGNSNTGFLTPESVNGDTPSNPLRPIADDTIDHASHTPGSVSSAFILEAMVNVISGPKVLMKQIPIWLPLGVADQKTYSFDSTTAAIMLASYTITHFGKATNPLVRVNRLGPGIPDHPLRLLRIGNQAFLQEFVLPPVQLPQYFTFDLTALKLITQPLPAATWTDDTPTGSNGALRPGISFHPKLRPILLPNKSGKKGNSADLTSPEKIQAIMTSLQDFKIVPIDPTKNIMGIEVPETLVHKLTGKKVTSKNGQPIIPVLLPKYIGLDPVAPGDLTMVITQDCDTCHSPASLPAVVEK

SEQ ID NO: 1190 - protein, 353 aa, Artificial Sequence
  gi|330690427|gb|AEC33281.1| VP1 [Goose haemorrhagic polyomavirus]
MAPKVKRPRNGPVPVPRLLVKGGIEVLGVRTGPDSTTTIEAYLNPRMGTDNGFSQAVTVATSLNPDVPPKAELPCYSCARIGLPMLNEDMTTPEILMWEAVSVKTEVVGVTTMCNVHSASIRMNGGYGVGRPIEGLNCHMFAVGGEPLELQGCVQNWSTTYPSGVVAPPLKDAKAQVLDPGLKARLDKDGAYPVECWCPDPSRNENTRYFGTYTGGQQTPPVLPFTNTVTTVLLDENGVGPLCKGDGLYLSCVDICGFYSEQYSQKQHFRGLPRYFSVSLRKRLVRNPYPVSSLLTSLFTSIIPKMQGQPMVGDNSQVEEVRVYEGVEPLPGDPDISRFVDRFGEQHTHMPSN

SEQ ID NO: 1191 - protein, 252 aa, Artificial Sequence
  gi|149391941|emb|CAJ12149.1| matrix protein M1 [Influenza A virus (A/duck/France/02166/2002(H5N3))]
MSLLTEVETYVLSIVPSGPLKAEIAQRLEDVFAGKNTDLEALMEWLKTRPILSPLTKGILGFVFTLTVPSERGLQRRRFVQNALNGNGDPNNMDRAVKLYRKLKREITFHGAKEVALSYSTGALASCMGLIYNRMGTVTTEVAFGLVCATCEQIADSQHRSHRQMVTTTNPLIRHENRMVLASTTAKAMEQMAGSSEQAAEAMEVASQARQMVQAMRTIGTHPSSSAGLKDDLLENLQAYQKRMGVQMQRFK

SEQ ID NO: 1192 - protein, 281 aa, Artificial Sequence
  gi|6573295|dbj|BAA88293.1| M protein [Hepatitis B virus]
MQWNATTFHQTLQDPRVRALYFPAGGSSSGTVSPAQNTVSAISSISSKTGDPVPNMENIASGLLGPLLVLQAGFFSLTKILTIPQSLDSWWTSLNFLGGTPVCLGQNSQSQISSHSPTCCPPICPGYRWMCLRRFIIFLCILLLCLIFLLVLLDYQGMLPVCPLIPGSSTTSTGPCKTCTTPAQGTSMFPSCCCTKPTDGNCTCIPIPSSWAFAKFLWEWASVRFSWLSLLVPFVQWFVGLSPTVWLSVIWMMWYWGPSLYNILSPFMPLLPIFFCLWVYI

SEQ ID NO: 1193 - protein, 100 aa, Artificial Sequence
  gi|349622885|gb|AEQ02994.1| core, partial [Hepatitis C virus subtype 1b]
KTKRNTNRRPQDVKFPGGGQIVGGVYLLPRRGPRLGVRATRKTSERSQPRGRRQPIPKARQPEGRAWAQPGYPWPLYGNEGMGWAGWLLSPRGSRPSWGP

SEQ ID NO: 1194 - protein, 190 aa, Artificial Sequence
  i|585286888|gb|AHJ39612.1| E1, partial [Hepatitis C virus]
MGYIPVVGAPLGGVARALAHGVRVLEDGVNYATGNLPGCSFSIFLLALLSCITTPVSAVQVKNTSFSYMVTNDCSNDSITWQLQAAVLHVPGCVPCEKVGNGSRCWIPVSPNIAVQQPGALTQGLRTHIDIVVMSATLCSALYVGDVCGGVMLAAQMFIVSPQHHWFVQECNCSIYPGTITGHRMAWDMM

SEQ ID NO: 1195 - protein, 44 aa, Artificial Sequence
  gi|40455651|gb|AAR85948.1| E2, partial [Hepatitis C virus subtype 1b]
LFAGVDGNTHVSGGALAYNTRGFTSLLTPGAKQNIQLVNTNGSW

SEQ ID NO: 1196 - protein, 660 aa, Artificial Sequence
  gi|9626450|ref|NP_056788.1| capsid protein [Hepatitis E virus]
MRPRPILLLLLMFLPMLPAPPPGQPSGRRRGRRSGGSGGGFWGDRADSQPFAIPYIHPTNPFAPDVTAAAGAGPRVRQPARPLGSAWRDQAQRPAAASRRRPTTAGAAPLTAVAPAHDTPPVPDVDSRGAILRRQYNLSTSPLTSSVATGTNLVLYAAPLSPLLPLQDGTNTHIMATEASNYAQYRVVRATIRYRPLVPNAVGGYAISISFWPQTTTTPTSVDMNSITSTDVRILVQPGIASEHVIPSERLHYRNQGWRSVETSGVAEEEATSGLVMLCIHGSLVNSYTNTPYTGALGLLDFALELEFRNLTPGNTNTRVSRYSSTARHRLRRGADGTAELTTTAATRFMKDLYFTSTNGVGEIGRGIALTLFNLADTLLGGLPTELISSAGGQLFYSRPVVSANGEPTVKLYTSVENAQQDKGIAIPHDIDLGESRVVIQDYDNQHEQDRPTPSPAPSRPFSVLRANDVLWLSLTAAEYDQSTYGSSTGPVYVSDSVTLVNVATGAQAVARSLDWTKVTLDGRPLSTTQQYSKTFFVLPLRGKLSFWEAGTTKAGYPYNYNTTASDQLLVENAAGHRVAISTYTTSLGAGPVSISAVAVLAPHSALALLEDTMDYPARAHTFDDFCPECRPLGLQGCAFQSTVAELQRLKMKVGKTREL

SEQ ID NO: 1197 - protein, 521 aa, Artificial Sequence
  gi|4007992|gb|AAC95340.1| gag protein [Human immunodeficiency virus 2]
MGARNSVLRGRKADELERIRLRPGGKKKYQLKHIVWAANELDRFGLAESLLESKEGCQRILKVLEPLVPTGSENLKSLFNTVCVVWCVHAEEKVKDTEGAKQIIQRHLAAEIETAEKMPSTSRPTAPPSEQGGNFPVQQVAGNYTHVPLSPRTLDAWVKLVEEKKFGAEVVPGFQALSEGCTPYDINQMLNCVGDHQAAMQIIREIINEEAADWDVAHPIPGPLPAGQLREPRGSDIAGTTSTVEEQIQWMFRPRNPVPVGNIYRRWIQIGLQKCVRMYNPTNILDIKQGPKEPFQSYVDRFYKSLRAEQTDPAVKNWMTQTLLVQNANPDCKLVLKGLGMNPTLEEMLTACQGVGGPGQKARLMAEALKEAMTPAPIPFAAAQQRRTIKCWNCGKEGHSARQCRAPRKQGCWKCGKPGHLMANCPERQAGFLGLGPWGKKPRNFPVTRVPQGLTPTAPPAEPAADLLEQYMQQGRKQREQRERPYKEVTEDLLHLEQGETPHKEVTEDLLHLNSLFGKDQ

SEQ ID NO: 1198 - protein, 500 aa, Artificial Sequence
  gi|120845|sp|P04591.3|GAG_HV1H2 RecName: Full=Gag polyprotein
MGARASVLSGGELDRWEKIRLRPGGKKKYKLKHIVWASRELERFAVNPGLLETSEGCRQILGQLQPSLQTGSEELRSLYNTVATLYCVHQRIEIKDTKEALDKIEEEQNKSKKKAQQAAADTGHSNQVSQNYPIVQNIQGQMVHQAISPRTLNAWVKVVEEKAFSPEVIPMFSALSEGATPQDLNTMLNTVGGHQAAMQMLKETINEEAAEWDRVHPVHAGPIAPGQMREPRGSDIAGTTSTLQEQIGWMTNNPPIPVGEIYKRWIILGLNKIVRMYSPTSILDIRQGPKEPFRDYVDRFYKTLRAEQASQEVKNWMTETLLVQNANPDCKTILKALGPAATLEEMMTACQGVGGPGHKARVLAEAMSQVTNSATIMMQRGNFRNQRKIVKCFNCGKEGHTARNCRAPRKKGCWKCGKEGHQMKDCTERQANFLGKIWPSYKGRPGNFLQSRPEPTAPPEESFRSGVETTTPPQKQEPIDKELYPLTSLRSLFGNDPSSQ

SEQ ID NO: 1199 - protein, 208 aa, Artificial Sequence
  gi|435294|emb|CAA54098.1| coat protein [Indian peanut clump virus]
MSNLSEVTRGGGHYGIEAWRNHVVSERLNSDWWIKSDRWDQLLADLRAVNFEVNSSRSEVASIINRVPKDLPAAVSARFPGAKGVLGSDTYTTLYYVHVKSDLKQKFYRLIAAADQGKNRDLEVGRSSVPAATSSSSNNQAIVPSKGINAIRDQQPLRDGSLSYRYDLLDIELTTVKQYDQFLFESTFSVNWIPNPAATPNAAAPGVN

SEQ ID NO: 1200 - protein, 469 aa, Artificial Sequence
  gi|56410891|gb|AAV88108.1| VP2, partial [Infectious bursal disease virus]
QTQQIVPFIRSLLMPTTGPASIPDDTLEKHTLRSETSTYNLTVGDTGSGLIVFFPGFPGSIVGAHYTLQSNGNYKFDQMLLTAQNLPASYNYCRLVSRSLTVRSSTLPGGVYALNGTINAVTFQGSLSELTDVSYNGLMSATANINDKIGNVLVGEGVTVLSLPTSYDLGYVRLGDPIPAIGLDPKMVATCDSSDRPRVYTITAADDYQFSSQYQAGGVTITLFSANIDAITSLSIGGELVFQTSVQGLILGATIYLIGFDGTAVITRAVAADNGLTAGTDNLMPFNIVIPTNEITQPITSIKLEIVTSKSGGQAGDQMSWSASGSLAVTIHGGNYPGALRPVTLVAYERVATGSVVTVAGVSNFELIPNPELAKNLVTEYGRFDPGAMNYTKLILSERDRLGIKTVWPTREYTDFREYFMEVADLNSPLKIAGAFGFKDIIRALRRIAVPVVSTLFPPAAPLAHAIGE

SEQ ID NO: 1201 - protein, 257 aa, Artificial Sequence
  gi|409712231|gb|AFV39834.1| VP3 protein, partial [Infectious bursal disease virus]
ASEFKETPELESAVRAMEAAANVDPLFQSALSVFMWLEENGIVTDMANFALSDPNAHRMRNFLANAPQAGSKSQRAKYGTAGYGVEARGPTPEEAQREKDTRISKKMETMGIYFATPEWVALNGHRGPSPGQLKYWQNTREIPDPNEDYLDYVHAEKSRLASEEQIPRAATSIYGAPGQAEPPQAFIDEVAKVYEINHGRGPNQEQMKDLLLTAMEMKHRNPRRAPPKPKPKPNAPTQRPPGRLGRWIRAVSDEDLE

SEQ ID NO: 1202 - protein, 252 aa, Artificial Sequence
  gi|89033171|gb|ABD59899.1| M1 [Influenza A virus (A/Taiwan/220/2004(H3N2))]
MSLLTEVETYVLSIVPSGPLKAEIAQRLEDVFAGKNTDLEALMEWLKTRPILSPLTKGILGFVFTLTVPSERGLQRRRFVQNALNGNGDPNNMDKAVKLYRKLKREITFHGAKEIALSYSAGALASCMGLIYNRMGAVTTEVAFGLVCATCEQIADSQHRSHRQMVATTNPLIKHENRMVLASTTAKAMEQMAGSSEQAAEAMEIASQARQMVQAMRAVGTHPSSSTGLRDDLLENLQTYQKRMGVQMQRFK

SEQ ID NO: 1203 - protein, 252 aa, Artificial Sequence
  gi|89033147|gb|ABD59883.1| M1 [Influenza A virus (A/TW/3355/1997(H1N1))]
MSLLTEVETYVLSIVPSGPLKAEIAQRLEDVFAGKNTDLEALMEWLKTRPILSPLTKGILGFVFTLTVPSERGLQRRRFVQNALNGNGDPNNMDRAVKLYRKLKREITFHGAKEIALSYSAGALASCMGLIYNRMGAVTTESAFGLICATCEQIADSQHKSHRQMVTTTNPLIRHENRMVLASTTAKAMEQMAGSSEQAAEAMEVASQARQMVQAMRAIGTHPSSSTGLKNDLLENLQAYQKRMGVQMQRFK

SEQ ID NO: 1204 - protein, 354 aa, Artificial Sequence
  gi|383932070|gb|AFH57194.1| VP1 [JC polyomavirus]
MAPTKRKGERKDPVQVPKLLIRGGVEVLEVKTGVDSITEVECFLTPEMGDPDEHLRGFSKSISISDTFESDSPSKDMLPCYSVARIPLPNLNEDLTCGNILMWEAVTLKTEVIGVTSLMNVHSNGQAAHDNGAGKPVQGTSFHFFSVGGEALELQGVVFNYRTKYPDGTIFPKNATVQSQVMNTEHKAYLDKNKAYPVECWVPDPTRNENTRYFGTLTGGENVPPVLHITNTATTVLLDEFGVGPLCKGDNLYLSAVDVCGMFTNRSGSQQWRGLSRYFKVQLRKRRVKNPYPISFLLTDLINRRTPRVDGQPMYGMDAQVEEVRVFEGTEELPGDPDMMRYVDRYGQLQTKML

SEQ ID NO: 1205 - protein, 303 aa, Artificial Sequence
  gi|1552357|emb|CAA78116.1| vp40 [Marburg virus - Musoke, Kenya, 1980]
MASSSNYNTYMQYLNSPPYADHGANQLIPADQLSNQQGITPNYVGDLNLDDQFKGNVCHAFTLEAIIDISAYNERTVKGVPAWLPLGIMSNFEYPLAHTVAALLTGSYTITQFTHNGQKFVRVNRLGTGIPAHPLRMLREGNQAFIQNMVIPRNFSTNQFTYNLTNLVLSVQKLPDDAWRPSKDKLIGNTMHPAVSIHPNLPPIVLPTVKKQAYRQHKNPNNGPLLAISGILHQLRVEKVPEKTSLFRISLPADMFSVKEGMMKKRGENSPVVYFQAPENFPLNGFNNRQVVLAYANPTLSAV

SEQ ID NO: 1206 - protein, 192 aa, Artificial Sequence
  gi|261041623|ref|YP_003208110.1| coat protein [Melandrium yellow fleck virus]
MSTPGTVKMTRAQRRAAARRAAKPQINKRIQPVIVEPPTSGLGRAIKALGGHTITKWETSCPEIKAKSSIQITIPLPSELSSERNKVLKVGRVLLWLGLLPSINGQVKACVTQTNPVPGAAFQSALAIADSSKEVVSAMYVDIFKGITIEDFVNDLAIYVYSAVDVAAKDIIVHLEVEHVRPVLDDYFTPLH

SEQ ID NO: 1207 - protein, 130 aa, Artificial Sequence
  gi|9626313|ref|NP_040648.1| coat protein [Enterobacteria phage MS2]
MASNFTQFVLVDNGGTGDVTVAPSNFANGVAEWISSNSRSQAYKVTCSVRQSSAQNRKYTIKVEVPKVATQTVGGVELPVAAWRSYLNMELTIPIFATNSDCELIVKAMQGLLKDGNPIPSAIAANSGIY

SEQ ID NO: 1208 - protein, 571 aa, Artificial Sequence
  gi|326581512|gb|ADZ96704.1| HN [Newcastle disease virus]
MDRAVNRVVLENEEREAKNTWRLVFRIAVLLLIVMTLAISAAALAYSMGASTPHDLAGISTVISETEDKVTSLLRSSQDVIDRIYKQVALESPLALLNTESIIMNAITSLSYQINEAANNSGCGAPVHDPDYIGGIGKELIVDDISDVTSFYPSAYQEHLNFIPAPTTGSGCTRIPSFDMSTTHYCYTHNVILSGCRDHSHSHQYLALGVLRTSATGRVFFSTLRSINLDDTQNRKSCSVSATPLGCDMLCSKVTGTEEEDYKSVAPTSMVHGRLGFDGQYHEKDLDTTILFKDWVANYPGVGGGSFIDDRVWFPVYGGLKPNSPSDTAQEGKYVIYKRHNNTCPDGQDYQIRMAKSSYKPGRFGGKRVQQAILSIKVSTSLGKDPVLTIPPNTVTLMGAEGRILTVGTSHFLYQRGSSYFSPALLYPMTVNNKTATLHSPYTFNAFTRPGSVPCQASARCPNSCITGVYTDPYPLIFHRNHTLRGVFGTMLDDEQARLNPVSAVFDNISRSRVTRVSSSSTKAAYTTSTCFKVVKTNKAYCLSIAEISNTLFGEFRIVPLLVEILKDDKV

SEQ ID NO: 1209 - protein, 553 aa, Artificial Sequence
  gi|326581511|gb|ADZ96703.1| F [Newcastle disease virus]
MGSKPSTRSPAPLMLIIRIMLILSCIRLTSSLDGRPLAAAGIVVTGDKAVNVYTSSQTGSIIVKLLPNMPRDKEACAKAPLEAYNRTLTTLLTPLGDSIRKIQGSVSTSGGRRQKRFIGAVIGSVALGVATAAQITAAAALIQANQNAANILRLKESIAATNEAVHEVTDGLSQLSVAVGKMQQFVNDQFNNTARELDCIKITQQVGVELNLYLTELTTVFGPQITSPALTQLTIQALYNLAGGNMDYLLTKLGIGNNQLSSLIGSGLITGYPILYDSQTQLLGIQVNLPSVGNLNNMRATYLGTLSVSTTKGYASALVPKVVTQVGSVIEELDTSYCIESDLDLYCTRIVTFPMSPGTYSCLSGNTSACMYSKTEGALTTPYMALKGSVIANCKITTCRCTDPPGIISQNYGEAVSLIDRHSCNVLSLDGITLRLSGEFDATYQKNISILDSQVIVTGNLDISTELGNVNNSISNALDRLAESNSKLEKVNVRLTSTSALITYIVLTVISLIFGALSLVLACYLMYKQKAQQKTLLWLGNNTLDQMRATTRT

SEQ ID NO: 1210 - protein, 489 aa, Artificial Sequence
  gi|326581508|gb|ADZ96700.1| NP [Newcastle disease virus]
MSSVFDEYEQLLAAQTRPNGTHGGGEKGSTLKAEVPVFTLNSDDPEDRWNFAVFCLRIAVSEDANKPLRQGALISLLCSHSQVMRNHVALAGKQNEATLAVLEIDGFANNVPQFNNRSGVSEERAQRFMVIAGSLPRACSNGTPFVTAGVEDDAPEDITDTLERILSIQVQVWVTVAKAMTAYETADESETRRINKYMQQGRVQKKYILHPVCRSAIQLTIRHSLAVRIFLVSELKRGRNTAGGSSTYYNLVGDVDSYIRNTGLTAFFLTLKYGINTKTSALALSSLTGDIQKMKQLMRLYRMKGENAPYMTLLGDSDQMSFAPAEYAQLYSFAMGMASVLDKGAGKYQFARDFMSTSFWRLGVEYAQAQGSSINEDMAAELKLTPAARRGLAAAAQRVSEEIGSVDIPTQQAGVLTGLSDENPRTPQGGSNKPQGQPDAGDGETQFLDFMRAVANSMREAPNPAQSTTHPEPPPTPGASQDNDTDWGY

SEQ ID NO: 1211 - protein, 132 aa, Artificial Sequence
  gi|3088547|gb|AAC14703.1| major coat protein [Enterobacteria phage NL95]
MAKLNKVTLTGIGKAGNQTLTLTPRGVNPTNGVASLSEAGAVPALEKRVTVSVAQPSRNRKNYKVQIKLQNPTACTKDACDPSVTRSGSRDVTLSFTSYSTERERALIRTELAALLKDDLIVDAIDNLNPAY

SEQ ID NO: 1212 - protein, 540 aa, Artificial Sequence
  gi|806475669|gb|AKB94550.1| vp1 [Norovirus GII.17]
MKMASNDAAPSNDGAAGLVPEGNNETLPLEPVAGAAIAAPVTGQNNIIDPWIRTNFVQAPNGEFTVSPRNSPGEILLNLELGPDLNPYLAHLSRMYNGYAGGVEVQVLLAGNAFTAGKILFAAVPPNFPVEFLSPAQITMLPHLIVDVRTLEPIMIPLPDVRNTFFHYSNQPNSRMRLVAMLYTPLRSNGSGDDVFTVSCRVLTRPTPDFEFTYLVPPSVESKTKPFSLPILTLSELTNSRFPVPIDSLFTAQNNVLQVQCQNGRCTLDGELQGTTQLLPSGICAFRGRVTAQINQRDRWHMQLQNLNGTTYDPTDDVPAPLGTPDFKGVVFGMVSQRNVGNDAPGSTRAQQAWVSTYSPQFVPKLGSVNLRISDNDDFQFQPTKFTPVGVNDDDDGHPFRQWELPNYSGELTLNMNLAPPVAPNFPGEQLLFFRSFVPCSGGYNQGIIDCLIPQEWIQHFYQESAPSQSDVALIRYVNPDTGRTLFEAKLHRSGYITVAHSGDYPLVVPANGHFRFDSWVNQFYSLAPMGTGNGRRRAQ

SEQ ID NO: 1213 - protein, 540 aa, Artificial Sequence; identical to SEQ ID NO: 1174
  gi|747744524|dbj|BAQ20804.1| capsid [Norovirus Hu/GII.4/Aichi352-14/2014]

SEQ ID NO: 1214 - protein, 188 aa, Artificial Sequence
  gi|248384|gb|AAB21997.1| coat protein [Physalis mottle virus]
MDSSEVVKVKQASIPAPGSILSQPNTEQSPAIVLPFQFEATTFGTAETAAQVSLQTADPITKLTAPYRHAQIVECKAILTPTDLAVSNPLTVYLAWVPANSPATPTQILRVYGGQSFVLGGAISAAKTIEVPLNLDSVNRMLKDSVTYTDTPKLLAYSRAPTNPSKIPTASIQISGRIRLSKPMLIAN

SEQ ID NO: 1215 - protein, 353 aa, Artificial Sequence
  gi|727361110|ref|YP_009110676.1| VP1 [Black sea bass polyomavirus 1]
MPRVKGGYEVLNLVAGPKEDVELEVDCFLSPSSSILKIGEDAKWLTSAIPLQKIPVQADGDRLKIWELYKVRTGIFQAQPYLPSQVNAEEPFNGPSQTGWGVGGLPLTGFSTANPQPGNPPFNNTEEPFALDGNENQTMKSWGFNPWMDNSKYFVSKTKGGGAYSTGDNNSTVILMSDEWGWGVMCPSGFCYLVSGDYMTKQVTADPPVEGVKFVYQTFPLPRYFTLYFRQRWVKSPVILMDLFEQMLNTKVSGFSGESGNIEEVQMGWGRSRAGPEGMMHPSGVASGYSSGTMMDTQDGGESSSNLTEDPHRPPIHPSVYKKPVIKPATTLPSGCEVHVKDLAGMKRTTKKK

SEQ ID NO: 1216 - protein, 579 aa, Artificial Sequence
  gi|557362420|gb|AGZ94859.1| VP2 [Porcine parvovirus]
MSENVEQHNPINAGTELSATGNESGGGGGGGGGRGAGGVGVSTGTFNNQTEFQYLGEGLVRITAHASRLIHLNMPEHETYKRIHVLNSESGVAGQMVQDDAHTQMVTPWSLIDANAWGVWFNPADWQLISNNMTEINLVSFEQEIFNVVLKTITESATSPPTKIYNNDLTASLMVALDTNNTLPYTPAAPRSETLGFYPWLPTKPTQYRYYLSCIRNLNPPTYTGQSQQITDSIQTGLHSDIMFYTIENAVPIHLLRTGDEFSTGIYHFDTKPLKLTHSWQTNRSLGLPPKLLTEPTTEGDQHPGTLPAANTRKGYHQTMNNSYTEATAIRPAQVGYNTPYMNFEYSNGGPFLTPIVPTADTQYNDDEPNGAIRFTMDYQHGHLTTSSQELERYTFNPQSKCGRAPKQQFNQQAPLNLENTNNGTLLPSDPIGGKSNMHFMNTLNTYGPLTALNNTAPVFPNGQIWDKELDTDLKPRLHVTAPFVCKNNPPGQLFVKIAPNLTDDFNADSPQQPRIITYSNFWWKGTLTLTAKMRSSNMWNPIQQHTTTAENIGNYIPTNIGGMRMFPEYSQLIPRKLY

SEQ ID NO: 1217 - protein, 128 aa, Artificial Sequence
  gi|9627906|ref|NP_042305.1| coat protein [Pseudomonas phage PP7]
MSKTIVLSVGEATRTLTEIQSTADRQIFEEKVGPLVGRLRLTASLRQNGAKTAYRVNLKLDQADVVDCSTSVCGELPKVRYTQVWSHDVTIVANSTEASRKSLYDLTKSLVATSQVEDLVVNLVPLGR

SEQ ID NO: 1218 - protein, 397 aa, Artificial Sequence
  gi|648823044|gb|AIC34772.1| VP6 [Rotavirus A]
MEVLYSLSKTLKDARDKIVEGTLYSNISDLIQQFNQMIVTMNGNDFQTGGIGNLPIRNWNFDFGLLGTTLLNIDANYVENARTTIEYFIDFIDNVCMDEMARESQRNGIAPQSEALRKLSGIKFKRINFDNSSDYIENWNLQNRRQRTGFVFHKPNILPYSASFTLNRSQPAHDNLMGTMWINAGSEIQVAGFDYSCAFNAPANIQQFEHVVPLRRALTTATITLLPDAERFSFPRVINSADGATTWYFNPVIIRPSNVEVEFLLNGQIINTYQARFGTIIARNFDTIRLSFQLVRPPNMTPAVANLFPQAPPFIFHATVGLTLRIESAVCESVLADASETLLANVTAVRQEYAIPVGPVFPPGMNWTELITNYSPSREDNLQRVFTVASIRSMLIK

SEQ ID NO: 1219 - protein, 890 aa, Artificial Sequence
  gi|648823036|gb|AIC34768.1| VP2 [Rotavirus A]
MAYRKRGAKRENSSQQNERLQEKEVEKNIDASMENKANNKKQQLPDKVLSQKEEIITDAQDDVKITDEVKKSSKEESKQLLEILKTKEDHQKEIQYEILQKTIPTFEPKESILKKLEDIKPEQAKKQTKLFRIFEPRQLPIYRANGERELRNRWYWKLKRDTLPDGDYDVREYFLNLYDQILIEMPDYLLLKDMAVENKNSRDAGKVVDSETASICDAIFQDEETEGVIRRFIADMRQQVQADRNVVNYPSILHPIDHAFNEYFLNHQLVEPLNNEIIFNYIPERIRNDVNYILNMDMNLPSTARYIRPNLLQDRLNLHDNFESLWDTITTSNYILARSVVPDLKEKELVSTEAQIQKMSQDLQLEALTIQSETQFLAGINSQAANDCFKTLIAAMLSQRTMSLEFVTTNYMSLISGMWLLTVIPNDMFLRESLVACELAIINTIVYPAFGMQRMHYRNGDPQTPFQIAEQQIQNFQVANWLHFINNNRFRQVVIDGVLNQTLNDNIRNGQVINQLMEALMQLSRQQFPTMPVDYKRSIQRGILLLSNRLGQLVDLTRLLSYNYETLMACITMNMQHVQTLTTEKLQLTSVTSLCMLIGNTTVIPSPQTLFHYYNVNVNFHSNYNERINDAVAIITAANRLNLYQKKMKSIVEEFLKRLQIFDVPRVPDDQMYRLRDRLRLLPVERRRLDIFNLILMNMEQIERASDKIAQGVIIAYRDMQLERDEMYGYVNIARNLDGYQQINLEELMRTGDYGQITNMLLNNQPVALVGALPFVTDSSVISLIAKLDATVFAQIVKLRKVDTLKPILYKINSDSNDFYLVANYDWIPTSTTKVYKQVPQPFDFRASMHMLTSNLTFTVYSDLLAFVSADTVEPINAVAFDNMRIMNEL

SEQ ID NO: 1220 - protein, 326 aa, Artificial Sequence
  gi|1430946|emb|CAA67568.1| VP7 [Rotavirus]
MYGIEYTTVLFYLISFVLISYILKTVIKVMDYIIYRVAFIIVMLTVFSNAQNYGINLPITGSMDTTYINSTQNDNFLTSTLCLYYPAEARTQIGDTEWKDTLSQLFLTKGWPTGSVYFNEYSNVLEFSVDPKLYCDYNVVLIRFISGEELDISELADLILNEWLCNPMDITLYYYQQTGEANKWISMGSSCTVKVCPLNTQTLGIGCQTTNTGTFEMVAENEKLAIVDVVDSVNHKLDITSTTCTIRNCNKLGPRENVAIIQVGGSDVLDITADPTTSPQIERMMRVIWKRWWQVFYTVVDYINQIVQVMSKRSRSLDSSSFYYRV

SEQ ID NO: 1221 - protein, 364 aa, Artificial Sequence
  gi|156254284|gb|ABU62649.1| VP1 [Simian virus 40]
MKMAPTKRKGSCPGAAPKKPKEPVQVPKLVIKGGIEVLGVKTGVDSFTEVECFLNPQMGNPDEHQKGLSKSLAAEKQFTDDSPDKEQLPCYSVARIPLPNLNEDLTCGNILMWEAVTVKTEVIGVTAMLNLHSGTQKTHENGAGKPIQGSNFHFFAVGGEPLELQGVLANYRTKYPAQTVTPKNATVDSQQMNTDHKAVLDKDNAYPVECWVPDPSKNENTRYFGTYTGGENVPPVLHITNTATTVLLDEQGVGPLCKADSLYVSAVDICGLFTNTSGTQQWKGLPRYFKITLRKRSVKNPYPISFLLSDLINRRTQRVDGQPMIGMSSQVEEVRVYEDTEELPGDPDMIRYIDEFGQTTTRMQ

SEQ ID NO: 1222 - protein, 81 aa, Artificial Sequence
  gi|576938863|gb|AHH53871.1| E protein [Simian haemorrhagic fever virus]
MGNILASVWTAFQHAIHELLISIFDLLIYLALILLTMCVGKLLGLVLKTIFRGGSAIVNTKPKRALQSAFTPLPSSYHKLP

SEQ ID NO: 1223 - protein, 132 aa, Artificial Sequence
  gi|262064287|gb|ACY07252.1| coat protein [Enterobacteria phage SP]
MAKLNQVTLSKIGKNGDQTLTLTPRGVNPTNGVASLSEAGAVPALEKRVTVSVAQPSRNRKNFKVQIKLQNPTACTKDACDPSVTRSAFADVTLSFTSYSTDEERALIRTELAALLADPLIVDAIDNLNPAY

SEQ ID NO: 1224 - protein, 192 aa, Artificial Sequence
  gi|22550383|ref|NP_689395.1| coat protein [Spring beauty latent virus]
MSTSGAGKTTRAQRRAAARKNRRSATKVVQPVIVESPASGIGRPTRARMGYSVTKWSVDCPAVTNAKSTTEISVKLPDDLSSEKNKQLKVGRILIWLGLVPSISGSVKACLTEKQENPSHSFQVALAYADNSKDVAAAMYSEDFKGITLEQVSEHLKIYLYSGDVVAAKSIVVHLEVEHVKPTFDEAFTPVF

SEQ ID NO: 1225 - protein, 851 aa, Artificial Sequence
  gi|24061819|gb|AAN39917.1| polyprotein P1, partial [Swine vesicular disease virus]
MGAQVSTQKTGAHETSLNAAGNSVIHYTNINYYKDAASNSANRQDFTQDPGKFTEPVKDIMVKSMPALNSPSAEECGYSDRVRSITLGNSTITTQECANVVVGYGVWPAYLKDEEATAEDQPTQPDVATCRFYTLESVMWQQGSPGWWWKFPDALSNMGLFGQNMQYHYLGRAGYTIHVQCNASKFHQGCLLVVCVPEAEMGCATLANKPDPKSLSKGEIASTFESQNSTGETAVQANVINAGMGVGVGNLTIFPHQWINLRTNNSATIVMPYINSVPMDNMFRHNNFTLMVIPFAPLSYSAGATTYVPITVTVAPMCAEYNGLRLAGKQGLPTLATPGSNQFLTSDDFQSPSAMPQFDVTPEMDIPGQVNNLMEIAEVDSVVPVNNTEGKEMSIEAYQIPVQSNPTNGSQVFGFPLTPGASSVLNRTLLGEILNYYAHWSGSIKLTFMFCGSAMATGKFLLAYSPPGAGAPTTRKEAMLGTHVIWDVGLQSSCVLCIPWISQTHYRYVVMDEYTAGGYITCWYQTNIVVPADAQSDCKILCFVSACNDFSVRMLKDTPFIKQDNFFQGPPGGVTEGIIARVADTVGSGPVNSESIPALTAAETGHTSQVVPSDTMQTRHVKNYHSRSESTVENFLCRSACVFYTTYKNHDSDGDNFAYWVINARQVAQLRRKLEMFTYARFDLELTFVITSTQEQSTTQGQDTPVLTHQIMYVPPGGPVPTKVNSYSWQTSTNPSVFWTEGNAPPRMSIPFIGIGNAYSMFYDGWARFDKQGTYGISTLNSMGTLYMRHVNGGGPGPIVSTVRIYFKPKHVKTWVPRPPRLCQYKKAGNVNFIPTSVTEGRTDITTMKTT

SEQ ID NO: 1226 - protein, 388 aa, Artificial Sequence
  gi|118197203|dbj|BAF37071.1| coat protein [Tomato bushy stunt virus]
MEMVTRNRNNVLAVSKKQLASMAATAAMGAIGNYVKQNGVTMIKDAVTLGTKAIRSARNRRKKGNQQEIVHVGGTGGAMMAPVAVSRQLIGSKPKFAGRTSGSVTVTHREYLTQVNNSSNFTVNGGIVGNLLQLNPLNGTLFSWLPAIASNFDQYVFNSVVLHYVPLCGTSEVGRVAMYFDKDSKDPEPADRVELANFSVLKETAPWAEALLRVPVDKVKRYCDDSTVVDRKLIDLGQLGLATYGGAGANPVGDVFVSYSVTLYFPQPTSSLLSTRQLNLAGGLAGSAGPGYIIVSTTPTVLTITFRSTGTFLVAGTFRDTVVSVLGSTGSIGINSQTTLDTVGLATSFFINCTVSALPATITYTSTGITSATVQCTRAVRANTTSLL

SEQ ID NO: 1227 - protein, 1255 aa, Artificial Sequence
  gi|1375090|gb|AAC19322.1| structural polyprotein [Venezuelan equine encephalitis virus]
MFPFQPMYPMQPMPYRNPFAAPRRPWFPRTDPFLAMQVQELTRSMANLTFKQRRDAPPEGPSAKKPKKEASQKQKGGGQGKKKKNQGKKKAKTGPPNPKAQNGNKKKTNKKPGKRQRMVMKLESDKTFPIMLEGKINGYACVVGGKLFRPMHVEGKIDNDVLAALKTKKASKYDLEYADVPQNMRADTFKYTHEKPQGYYSWHHGAVQYENGRFTVPKGVGAKGDSGRPILDNQGRVVAIVLGGVNEGSRTALSVVMWNEKGVTVKYTPENCEQWSLVTTMCLLANVTFPCAQPPICYDRKPAETLAMLSVNVDNPGYDELLEAAVKCPGRKRRSTEELFKEYKLTRPYMARCIRCAVGSCHSPIAIEAVKSDGHDGYVRLQTSSQYGLDSSGNLKGRTMRYDMHGTIKEIPLHQVSLHTSRPCHIVDGHGYFLLARCPAGDSITMEFKKDSVTHSCSVPYEVKFNPVGRELYTHPPEHGVEQACQVYAHDAQNRGAYVEMHLPGSEVDSSLVSLSGSSVTVTPPVGTSALVECECGGTKISETINKTKQFSQCTKKEQCRAYRLQNDKWVYNSDKLPKAAGATLKGKLHVPFLLADGKCTVPLAPEPMITFGFRSVSLKLHPKNPTYLTTRQLADEPHYTHELISEPAVRNFTVTEKGWEFVWGNHPPKRFWAQETAPGNPHGLPHEVITHYYHRYPMSTILGLSICAAIATVSVAASTWLFCRSRVACLTPYRLTPNARIPFCLAVLCCARTARAETTWESLDHLWNNNQQMFWIQLLIPLAALIVVTRLLRCVCCVVPFLVMAGAAGAGAYEHATTMPSQAGISYNTIVNRAGYAPLPISITPTKIKLIPTVNLEYVTCHYKTGMDSPAIKCCGSQECTPTYRPDEQCKVFTGVYPFMWGGAYCFCDTENTQVSKAYVMKSDDCLADHAEAYKAHTASVQAFLNITVGEHSIVTTVYVNGETPVNFNGVKLTAGPLSTAWTPFDRKIVQYAGEIYNYDFPEYGAGQPGAFGDIQSRTVSSSDLYANTNLVLQRPKAGAIHVPYTQAPSGFEQWKKDKAPSLKFTAPFGCEIYTNPIRAENCAVGSIPLAFDIPDALFTRVSETPTLSAAECTLNECVYSSDFGGIATVKYSASKSGKCAVHVPSGTATLKEAAVELTEQGSATIHFSTANIHPEFRLQICTSYVTCKGDCHPPKDHIVTHPQYHAQTFTAAVSKTAWTWLTSLLGGSAVIIIIGLVLATIVAMYVLTNQKHN

SEQ ID NO: 1228 - protein, 46 aa, Artificial Sequence
  TM_domain_HA
KLESTRIYQILAIYSTVASSLVLVVSLGAISFWMCSNGSLQCRICI

SEQ ID NO: 1229 - protein, 46 aa, Artificial Sequence; identical to SEQ ID NO: 1228
  HA_TM-domain

SEQ ID NO: 1230 - protein, 17 aa, Artificial Sequence
  HIV_envelop_TM1_derived_from_BAF32550.1
LILGLVIICNASNNLWV

SEQ ID NO: 1231 - protein, 22 aa, Artificial Sequence
  HIV_envelop_TM2_derived_from_ BAF32550.1
GIGAMIFGFLGAAGSTMGAASI

SEQ ID NO: 1232 - protein, 23 aa, Artificial Sequence
  HIV_envelop_TM3_derived_from_ BAF32550.1
LWYIRLFIMIVGGLIGLRIIFAV

SEQ ID NO: 1233 - protein, 23 aa, Artificial Sequence
  EIAV_envelop_TM1_derived_from_ AAC03762.1
AIVAAIVAATAIAASATMSYVAL

SEQ ID NO: 1234 - protein, 23 aa, Artificial Sequence
  EIAV_envelop_TM2_derived_from_ AAC03762.1
WIPGLGASIIKYIVMFLLIYLLL

SEQ ID NO: 1235 - protein, 22 aa, Artificial Sequence
  EIAV_envelop_TM3_derived_from_ AAC03762.1
LFWGLVIIVGRIAGYGLRGLAV

SEQ ID NO: 1236 - protein, 23 aa, Artificial Sequence
  MLV_envelop_TM_derived_from_AAA46526.1
WFTTLISTIMGPLIVLLLILLLG

SEQ ID NO: 1237 - protein, 23 aa, Artificial Sequence
  MMTV_envelop_TM1_derived_from_BAA03768.1
FVAAIILGISALIAIITSFAVAT

SEQ ID NO: 1238 - protein, 23 aa, Artificial Sequence
  MMTV_envelop_TM2_derived_from_BAA03768.1
YFIFIGVGALLLVIVLMIFPIVF

SEQ ID NO: 1239 - protein, 23 aa, Artificial Sequence
  VSV_Glycoprotein-TM_derived_from_CAA24525.1
AVIIGFVILMFLIKLIGVLSSLF

SEQ ID NO: 1240 - protein, 20 aa, Artificial Sequence
  Rabies_Glycoprotein_TM_derived_from_AEV43288.1
VLMGAGVLTALMLMIFLMTC

SEQ ID NO: 1241 - protein, 34 aa, Artificial Sequence
  gi|827343090|pdb|4WOL|C
BCSTVSPGVLAGIVVGDLVLTVLIALAVYFLGRL

SEQ ID NO: 1242 - protein, 473 aa, Artificial Sequence
  gi|119620014|gb|EAW99608.1|
MAGPPVSCRMLLCFDLSLGQGLPSFMASFLPSGEGSWEGATISAVCAFRPQDIRTVLNGPFRELKHDCNRGLPVVDNDVPQPRPGECITNNMKLRHFGSSLSLPDRVLTFIRDHPLMDRPVFPADGHPLLVTTDTAYLRVVAHRVTSLSGKEYDVLYLGTEDGHLHRAVRIGAQLSVLEDLALFPEPQPVENMKLYHSWLLVGSRTEVTQVNTTNCGRLQSCSECILAQDPVCAWSFRLDECVAHAGEHRGLVQDIESADVSSLCPKEPGERPVVFEVPVATAAHVVLPCSPSSAWASCVWHQPSGVTALTPRRDGLEVVVTPGAMGAYACECQEGGAAHVVAAYSLVWGSQRDAPSRAHTVGAGLAGFFLGILAASLTLILIGRRQQRRRQRELLARDKVGLDLGAPPSGTTSYSQDPPSPSPEDERLPLALAKRGSGFGGFSPPFLLDPCPSPAHIRLTGAPLATCDETSI

SEQ ID NO: 1243 - protein, 382 aa, Artificial Sequence
  gi|119620013|gb|EAW99607.1|
MKLRHFGSSLSLPDRVLTFIRDHPLMDRPVFPADGHPLLVTTDTAYLRVVAHRVTSLSGKEYDVLYLGTEDGHLHRAVRIGAQLSVLEDLALFPEPQPVENMKLYHSWLLVGSRTEVTQVNTTNCGRLQSCSECILAQDPVCAWSFRLDECVAHAGEHRGLVQDIESADVSSLCPKEPGERPVVFEVPVATAAHVVLPCSPSSAWASCVWHQPSGVTALTPRRDGLEVVVTPGAMGAYACECQEGGAAHVVAAYSLVWGSQRDAPSRAHTVGAGLAGFFLGILAASLTLILIGRRQQRRRQRELLARDKVGLDLGAPPSGTTSYSQDPPSPSPEDERLPLALAKRGSGFGGFSPPFLLDPCPSPAHIRLTGAPLATCDETSI

SEQ ID NO: 1244 - protein, 159 aa, Artificial Sequence
  gi|119603443|gb|EAW83037.1|
MACSPCEGLYFFEFVSCSAFVVTGVLLIMFSLNLHMRIPQINWNLTDLVNTGLSAFLFFIASIVLAALNHRAGAEIAAVIFGFLATAAYAVNTFLAVQKWRVSVRQQSTNDYIRARTESRDVDSRPEIQRLDTFSYSTNVTVRKKSPTNLLSLNHWQLA

SEQ ID NO: 1245 - protein, 93 aa, Artificial Sequence
  gi|119603442|gb|EAW83036.1|
MCLVFQLTWKPWVGVPWLAWLLGSSLYVWSGLGPQSFAAIDLSPTAGKASHCPQFSPFHLKDQFFMVLVLIFFIVFKSVFLYVEGNNFLNTNR

SEQ ID NO: 1246 - protein, 96 aa, Artificial Sequence
  gi|119603438|gb|EAW83032.1|gi|119603440|gb|EAW83034.1|
MQLNDKWQGLCWPMMDFLRCVTAALIYFAISITAIAKYSDGASKAAGVFGFFATIVFATDFYLIFNDVAKFLKQGDSADETTAHKTEEENSDSDSD

SEQ ID NO: 1247 - protein, 93 aa, Artificial Sequence
  gi|119603435|gb|EAW83029.1|
MWKTLLVMERFLRGNSNLCPWKFSRREGSYQQYHYSCVPFSSCHLGHARKEKKAFTLCRGVPVSHSGNRVLHRCVCGHHEDEDQLEKIPGSRS

SEQ ID NO: 1248 - protein, 101 aa, Artificial Sequence
  gi|119603431|
MAIKERVEGRAKVPYKFRDSLKRFSFSPTGMLKILRLSLILGALACFIITQANESFITITSLEICIVVFFILIYVLTLHHLLTYLHWPLLNAEYRKQTKQI

SEQ ID NO: 1249 - protein, 124 aa, Artificial Sequence
  gi|119603430|gb|EAW83024.1|
MAIKERVEGRAKVPYKFRDSLKRFSFSPTGMLKILRLSLILGALACFIITQANESFITITSLEICIVVFFILIYVLTLHHLLTYLHWPLLDLTNSIITAVFLSVVAILAMQEKKRRHLLYVGGR

SEQ ID NO: 1250 - protein, 286 aa, Artificial Sequence
  gi|119603429|gb|EAW83023.1|
MDPEHAKPESSEAPSGNLKQPETAAALASSGSVVSSVPKAQRNISAKTAPRKHPAVSIRSAQSAAAARPQGSEGTAPSRKATTRPPPKPTLPPPTPSAHTESKLLNEMAIKERVEGRAKVPYKFRDSLKRFSFSPTGMLKILRLSLILGALACFIITQANESFITITSLEICIVVFFILIYVLTLHHLLTYLHWPLLDLTNSIITAVFLSVVAILAMQEKKRRHLLYVGGSLCLTAVIVCCIDAFVVTTKMRTNLKRFLGVEVERKLSPAKDAYPETGPDAPQRPA

SEQ ID NO: 1251 - protein, 476 aa, Artificial Sequence
  gi|119597738|gb|EAW77332.1|
MRVFLLCAYILLLMVSQLRAVSFPEDDEPLNTVDYHYSRQYPVFRGRPSGNESQHRLDFQLMLKIRDTLYIAGRDQVYTVNLNEMPKTEVIPNKKLTWRSRQQDRENCAMKGKHKDECHNFIKVFVPRNDEMVFVCGTNAFNPMCRYYRLSTLEYDGEEISGLARCPFDARQTNVALFADGKLYSATVADFLASDAVIYRSMGDGSALRTIKYDSKWIKEPHFLHAIEYGNYVYFFFREIAVEHNNLGKAVYSRVARICKNDMGGSQRVLEKHWTSFLKARLNCSVPGDSFFYFDVLQSITDIIQINGIPTVVGVFTTQLNSIPGSAVCAFSMDDIEKVFKGRFKEQKTPDSVWTAVPEDKVPKPRPGCCAKHGLAEAYKTSIDFPDETLSFIKSHPLMDSAVPPIADEPWFTKTRVRYRLTAISVDHSAGPYQNYTVIFVGSEAGMVLKVLAKTSPFSLNDSVLLEEIEAYNHAK

SEQ ID NO: 1252 - protein, 223 aa, Artificial Sequence
  gi|119586564|gb|EAW66160.1|
MLSARDRRDRHPEEGVVAELQGFAVDKAFLTSHKGILLETELALTLIIFICFTASISAYMAAALLEFFITLAFLFLYATQYYQRFDRINWPCLLQGHGQSGGPHPLDLLSHSAKVQPQPWPGLTPPGWHTPAAVPWVPAPAPGFWSWLLWFICFHSLGSSDFLRCVSAIIIFLVVSFAAVTSRDGAAIAAFVFGIILVSIFAYDAFKIYRTEMAPGASQGDQQ

SEQ ID NO: 1253 - protein, 105 aa, Artificial Sequence
  gi|119586563|gb|EAW66159.1|
MLSARDRRDRHPEEGVVAELQGFAVDKAFLTSHKGILLETELDFLRCVSAIIIFLVVSFAAVTSRDGAAIAAFVFGIILVSIFAYDAFKIYRTEMAPGASQGDQQ

SEQ ID NO: 1254 - protein, 129 aa, Artificial Sequence
  gi|119586561|gb|EAW66157.1|
MLSARDRRDRHPEEGVVAELQGFAVDKAFLTSHKGILLETELVTAASQPGASISLTPGSWPALCQPPAHPSVASFPKPSGHLSCPQLPLLRLLLCLLAASPPGDIYSRFQLQQEGLQLDRVTFWDIEEA

SEQ ID NO: 1255 - protein, 74 aa, Artificial Sequence
  gi|119586560|gb|EAW66156.1|
MLSARDRRDRHPEEGVVAELQGFAVDKAFLTSHKGILLETELVFGIILVSIFAYDAFKIYRTEMAPGASQGDQQ

SEQ ID NO: 1256 - protein, 104 aa, Artificial Sequence [sequence omitted]

SEQ ID NO: 1257 - protein, 147 aa, Artificial Sequence
  gi|119584828|gb|EAW64424.1|
MSHGAGLVRTTCSSGSALGPGAGAAQPSASPLEGLLDLSYPRTHAALLKVAQMVSERGARGRGSTGRPGKAGVRERTRRASGPGRSPGSIAQRAGHRVAKVRGRLPPGKLLPQPPRWSSVPRAAPALAPADPGRQGRKFLRPPPCEA

SEQ ID NO: 1258 - protein, 370 aa, Artificial Sequence
  gi|119573378|gb|EAW52993.1|
MKDHFLMDEQVVGTPLLVKSGVEYTRLAVETAQGLDGHSHLVMYLGTTTGSLHKAVVSGDSSAHLVEEIQLFPDPEPVRNLQLAPTQGAVFVGFSGGVWRVPRANCSVYESCVDCVLARDPHCAWDPESRTCCLLSAPNLNSWKQDMERGNPEWACASGPMSRSLRPQSRPQIIKEVLAVPNSILELPCPHLSALASYYWSHGPAAVPEASSTVYNGSLLLIVQDGVGGLYQCWATENGFSYPVISYWVDSQDQTLALDPELAGIPREHVKVPLTRVSGGAALAAQQSYWPHFVTVTVLFALVLSGALIILVASPLRALRARGKVQGCETLRPGEKAPLSREQHLQSPKECRTSASDVDADNNCLGTEVA

SEQ ID NO: 1259 - protein, 152 aa, Artificial Sequence [sequence omitted]

SEQ ID NO: 1260 - protein, 35 aa, Artificial Sequence
  gi|685425507|pdb|2MK9|A
BMDSAPFELFFMINTSILLIFIFIVLLIHFEGWRI

SEQ ID NO: 1261 - protein, 49 aa, Artificial Sequence
  gi|731187694|pdb|2MV6|A
MSEPVSLLTPSDLDPLILTLSLILVVILVLLTVLALLSHRRALKQKIWP

SEQ ID NO: 1262 - protein, 123 aa, Artificial Sequence
  gi|187951705|gb|AAI37519.1
MWTQRWKRSVSPGPADIRFVWEKNGRALETCVPVQTHALPDGRAHALSWLQDAIRESAEYRCSVLSSAGNKTSKVQVAVMRPEVTHQERWTRELSAWRAVAGEHDRMMQSWRKAWESCSKDTL

SEQ ID NO: 1263 - protein, 208 aa, Artificial Sequence
  gi|62739441|gb|AAH93679.1|
MRSGEELDGFEGEASSTSMISGASSPYQPTTEPVSQRRGLAGLRCDPDYLRGALGRLKVAQVILALIAFICIETIMACSPCEGLYFFEFVSCSAFVVTGVLLIMFSLNLHMRIPQINWNLTDLVNTGLSAFLFFIASIVLAALNHRAGAEIAAVIFGFLATAAYAVNTFLAVQKWRVSVRQQSTNDYIRARTESRDVDSRPEIQRLDT

SEQ ID NO: 1264 - protein, 182 aa, Artificial Sequence
  gi|28838354|gb|AAH47701.1|
MWPPDPDPDPDPEPAGGSRPGPAVPGLRALLPARAFLCSLKGRLLLAESGLSFITFICYVASSASAFLTAPLLEFLLALYFLFADAMQLNDKWQGLCWPMMDFLRCVTAALIYFAISITAIAKYSDGASKAAGVFGFFATIVFATDFYLIFNDVAKFLKQGDSADETTAHKTEEENSDSDSD

SEQ ID NO: 1265 - protein, 173 aa, Artificial Sequence
  gi|27370612|gb|AAH41390.1|
MEEPQRARSHTVTTTASSFAENFSTSSSSFAYDREFLRTLHGFLIVAEIVLGLLVWTLIAGTEYFRVPAFGWVMFVAVSYWVLTVFFLIIYITMTYTRIPQVPWTTVGLCFNGSAFVLYLSAAVVDASSVSPERDSHNFNSWAASSFFAFLVTICYAGNTYFSFIAWRSRTIQ

SEQ ID NO: 1266 - protein, 204 aa, Artificial Sequence
  gi|21707219|gb|AAH33818.1|
MGAPLAVALGALHYLALFLQLGGATRPAGHAPWDNHVSGHALFTETPHDMTARTGEDVEMACSFRGSGSPSYSLEIQWWYVRSHRDWTDKQAWASNQLKASQQEDAGKEATKISVVKVVGSNISHKLRLSRVKPTDEGSYECRVIDFSDGKARHHKVKAYLRVQPGENSVLHLPEAPPAAPAPPPPKPGKELRKRSVDQEACSL

SEQ ID NO: 1267 - protein, 243 aa, Artificial Sequence
  gi|20306326|gb|AAH28404.1|
MGIFLVYVGFVFFSVLYVQQGLSSQAKFTEFPRNVTATEGQNVEMSCAFQSGSASVYLEIQWWFLRGPEDLDPGAEGAGAQVKLLPDRDPDSDGTKISTVKVQGNDISHKLQISKVRKKDEGLYECRVTDANYGELQEHKAQAYLKVNANSHARRMQAFEASPMWLQDMKPRKNVSAAIPSSIHGSANQRTHSTSSPQVVAKIPKQSPQSGMETHFEPFILPLTNAPQKGQSYRVDRFMNGDF

SEQ ID NO: 1268 - protein, 248 aa, Artificial Sequence
  gi|19263730|gb|AAH25354.1|  gi|119603436|gb|EAW83030.1|
MAPKAAKGAKPEPAPAPPPPGAKPEEDKKDGKEPSDKPQKAVQDHKEPSDKPQKAVQPKHEVGTRRGCRRYRWELKDSNKEFWLLGHAEIKIRSLGCLIAAMILLSSLTVHPILRLIITMEISFFSFFILLYSFAIHRYIPFILWPISDLFNDLIACAFLVGAVVFAVRSRRSMNLHYLLAVILIGAAGVFAFIDVCLQRNHFRGKKAKKHMLVPPPGKEKGPQQGKGPEPAKPPEPGKPPGPAKGKK

SEQ ID NO: 1269 - protein, 156 aa, Artificial Sequence
  gi|15341863|gb|AAH13109.1|  gi|119586562|gb|EAW66158.1|
MLSARDRRDRHPEEGVVAELQGFAVDKAFLTSHKGILLETELALTLIIFICFTASISAYMAAALLEFFITLAFLFLYATQYYQRFDRINWPCLDFLRCVSAIIIFLVVSFAAVTSRDGAAIAAFVFGIILVSIFAYDAFKIYRTEMAPGASQGDQQ

SEQ ID NO: 1270 - protein, 175 aa, Artificial Sequence
  gi|14603318|gb|AAH10116.1|  gi|119584832|gb|EAW64428.1| gi|119584829|gb|EAW64425.1|
MSHGAGLVRTTCSSGSALGPGAGAAQPSASPLEGLLDLSYPRTHAALLKVAQMVTLLIAFICVRSSLWTNYSAYSYFEVVTICDLIMILAFYLVHLFRFYRVLTCISWPLSELLHYLIGTLLLLIASIVAASKSYNQSGLVAGAIFGFMATFLCMASIWLSYKISCVTQSTDAAV

SEQ ID NO: 1271 - protein, 183 aa, Artificial Sequence
  gi|12803901|gb|AAH02797.1|  gi|119584833|gb|EAW64429.1|
MENGAVYSPTTEEDPGPARGPRSGLAAYFFMGRLPLLRRVLKGLQLLLSLLAFICEEVVSQCTLCGGLYFFEFVSCSAFLLSLLILIVYCTPFYERVDTTKVKSSDFYITLGTGCVFLLASIIFVSTHDRTSAEIAAIVFGFIASFMFLLDFITMLYEKRQESQLRKPENTTRAEALTEPLNA

SEQ ID NO: 1272 - protein, 137 aa, Artificial Sequence
  gi|557803962|pdb|2MAW|A
SNAEEELYYGLNLLIPCVLISALALLVFLLPADSGEKISLGITVLLSLTVFMLLVAEIMPSTSDSSPSIAQYFASTMIIVGLSVVVTVIVLQYHHHDPDGGEGGGEGIDRLCLMAFSVFTIICTIGILMSAPNFVEE

SEQ ID NO: 1273 - protein, 57 aa, Artificial Sequence
  gi|605603263|pdb|2MFR|A
MTYFYVTDYLDVPSNIAKIIIGPLIFVFLFSVVIGSIYLFLRKRQPDGPLEHHHHHH

SEQ ID NO: 1274 - protein, 29 aa, Artificial Sequence
  gi|550545410|pdb|2LZ4|A  gi|550545413|pdb|2LZ3|B gi|550545412|pdb|2LZ3|A gi|550545411|pdb|2LZ4|
BKGAIIGLMVGGVVIATMIVITLVMLKKK

SEQ ID NO: 1275 - protein, 50 aa, Artificial Sequence
  gi|576864795|pdb|2M3E|A
SNADVVYEKQMLYLYVLSGIGGLLLLLLIFIVLYKVGFFKRNLKEKMEAG

SEQ ID NO: 1276 - protein, 45 aa, Artificial Sequence
  gi|554793130|pdb|2M0B|A  gi|554793131|pdb|2M0B|
BEGCPTNGPKIPSIATGMVGALLLLLVVALGIGLFMRRRHIVRKR

SEQ ID NO: 1277 - protein, 24 aa, Artificial Sequence
  gi|390136107|pdb|2LS4|A
YNGYLCIAVAAGAGTGYFLFSWKK

SEQ ID NO: 1278 - protein, 29 aa, Artificial Sequence
  gi|390136106|pdb|2LS3|A
KHLLQTVLHIIQVVISYFLMLIFMTYNKK

SEQ ID NO: 1279 - protein, 25 aa, Artificial Sequence
  gi|390136105|pdb|2LS2|A
KNTAGEMAGAFVAVFLLAMFYEGLK

SEQ ID NO: 1280 - protein, 44 aa, Artificial Sequence
  gi|388325519|pdb|2LOH|A  gi|392311466|pdb|2LLM|A gi|388325520|pdb|2LOH|
BGSQKLVFFAEDVGSNKGAIIGLMVGGVVIATVIVITLVMLKKK

SEQ ID NO: 1281 - protein, 41 aa, Artificial Sequence
  gi|333360991|pdb|2L9U|A  gi|333360992|pdb|2L9U|
BMGRTHLTMALTVIAGLVVIFMMLGGTFLYWRGRRHHHHHH

SEQ ID NO: 1282 - protein, 48 aa, Artificial Sequence
  gi|308387888|pdb|3NJP|C  gi|308387889|pdb|3NJP|
DECPLSHDGYCLHDGVCMYIEALDKYACNCVVGYIGERCQYRDLKWWE

SEQ ID NO: 1283 - protein, 39 aa, Artificial Sequence
  gi|198443044|pdb|2K1K|A  gi|198443047|pdb|2K1L|B gi|198443046|pdb|2K1L|A gi|198443045|pdb|2K1K|
BSPPVSRGLTGGEIVAVIFGLLLGAALLLGILVFRSRRA

SEQ ID NO: 1284 - protein, 35 aa, Artificial Sequence
  gi|193885173|pdb|2K58|B
RRKPLFYTINLIIPCVLITSLAILVFYLPSDCGEK

SEQ ID NO: 1285 - protein, 46 aa, Artificial Sequence
  gi|146387285|pdb|2J5D|A  gi|146387286|pdb|2J5D|
BRNTSVMKKGGIFSAEFLKVFLPSLLLSHLLAIGLGIYIGRRLTTS

SEQ ID NO: 1286 - protein, 28 aa, Artificial Sequence
  gi|37926792|pdb|1MOT|A
APARVGLGITTVLTMTTQSSGSRASLPK

SEQ ID NO: 1287 - protein, 41 aa, Artificial Sequence
  gi|2554808|pdb|1AFO|A  gi|307567927|pdb|2KPF|B gi|307567926|pdb|2KPF|A gi|2554809|pdb|1AFO|
BVQLAHHFSEPEITLIIFGVMAGVIGTILLISYGIRRLIKK

SEQ ID NO: 1288 - protein, 143 aa, Artificial Sequence [sequence omitted]

SEQ ID NO: 1289 - protein, 148 aa, Artificial Sequence [sequence omitted]

SEQ ID NO: 1290 - protein, 116 aa, Artificial Sequence
  gi|255046036|gb|ACU00111.1|
MTAEFLSLLCLDTRTIFVAIFSCISILLLFLSVFIIYRCSQHSSSSEESTKRTSHSKLPEQEAAEADLSNMERVSLSTADPQGVTYAELSTSALSEAASDTTQEPPGSHEYAALKV

SEQ ID NO: 1291 - protein, 205 aa, Artificial Sequence
  gi|255046034|gb|ACU00110.1|
MTAEFLSLLCLGLCLGYEDEKKNEKPPKPSLHAWPSSVVEAESNVTLKCQAHSQNVTFVLRKVNDSGYKQEQSSAENEAEFPFTDLKPKDAGRYFCAYKTTASHEWSESSEHLQLVVTDKHDELEAPSMKTGSSSEESTKRTSHSKLPEQEAAEADLSNMERVSLSTADPQGVTYAELSTSALSEAASDTTQEPPGSHEYAALKV

SEQ ID NO: 1292 - protein, 269 aa, Artificial Sequence
  gi|1209374|gb|AAA91084.1|
MAAALFVLLGFALLGTHGASGAAGTVFTTVEDLGSKILLTCSLNDSATEVTGHRWLKGGVVLKEDALPGQKTEFKVDSDDQWGEYSCVFLPEPMGTANIQLHGPPRVKAVKSSEHINEGETAMLVCKSESVPPVTDWAWYKITDSEDKALMNGSESRFFVSSSQGRSELHIENLNMEADPGQYRCNGTSSKGSDQAIITLRVRSHLAALWPFLGIVAEVLVLVTIIFIYEKRRKPEDVLDDDDAGSAPLKSSGQHQNDKGKNVRQRNSS

SEQ ID NO: 1293 - protein, 236 aa, Artificial Sequence
  gi|283480655|emb|CAZ61324.1|
MTAEFLSLLCLGLCLGYEDEKKNEKPPKPSLHAWPSSVVEAESNVTLKCQAHSQNVTFVLRKVNDSGYKQEQSSAENEAEFPFTDLKPKDAGRYFCAYKTTASHEWSESSEHLQLVVTDKHDELEAPSMKTDTRTIFVAIFSCISILLLFLSVFIIYRCSQHSSSSEESTKRTSHSKLPEQEAAEADLSNMERVSLSTADPQGVTYAELSTSALSEAASDTTQEPPGSHEYAALKV

SEQ ID NO: 1294 - protein, 476 aa, Artificial Sequence
  gi|94315010|tpg|DAA01126.1|
MSTQRLRNEDYHDYSSTDVSPEESPSEGLNNLSSPGSYQRFGQSNSTTWFQTLIHLLKGNIGTGLLGLPLAVKNAGIVMGPISLLIIGIVAVHCMGILVKCAHHFCRRLNKSFVDYGDTVMYGLESSPCSWLRNHAHWGRRVVDFFLIVTQLGFCCVYFVFLADNFKQVIEAANGTTNNCHNNETVILTPTMDSRLYMLSFLPFLVLLVFIRNLRALSIFSLLANITMLVSLVMIYQFIVQRIPDPSHLPLVAPWKTYPLFFGTAIFSFEGIGMVLPLENKMKDPRKFPLILYLGMVIVTILYISLGCLGYLQFGANIQGSITLNLPNCWLYQSVKLLYSIGIFFTYALQFYVPAEIIIPFFVSRAPEHCELVVDLFVRTVLVCLTCILAILIPRLDLVISLVGSVSSSALALIIPPLLEVTTFYSEGMSPLTIFKDALISILGFVGFVVGTYEALYELIQPSNAPIFINSTCAFI

SEQ ID NO: 1295 - protein, 373 aa, Artificial Sequence
  gi|6729336|dbj|BAA89782.1|
MDTLEEVTWANGSTALPPPLAPNISVPHRCLLLLYEDIGTSRVRYWDLLLLIPNVLFLIFLLWKLPSARAKIRITSSPIFITFYILVFVVALVGIARAVVSMTVSTSNAATVADKILWEITRFFLLAIELSVIILGLAFGTWESKSSIKRVLAITTVLSLAYSVTQGTLEILYPDAHLSAEDFNIYGHGGRQFWLVSSCFFFLVYSLVVILPKTPLKERISLPSRRSFYVYAGILALLNLLQGLGSVLLCFDIIEGLCCVDATTFLYFSFFAPLIYVAFLRGFFGSEPKILFSYKCQVDETEEPDVHLPQPYAVARREGLEAAGAAGASAASYSSTQFDSAGGVAYLDDIASMPCHTGSINSTDSERWKAINA

SEQ ID NO: 1296 - protein, 137 aa, Artificial Sequence
  gi|148679264|gb|EDL11211.1|
PQGLSFITFICYVVSSASAFLTVPLLEFLLAVYFLFADAMQLNDKWQGLCWPMMDFLRCVTAALIYFVISITAVAKYSDGAYKAAGVFGFFATIVFAIDFYLIFNEVAKFLKQGDSGNETTAHRTEEENSNSDSDSD

SEQ ID NO: 1297 - protein, 174 aa, Artificial Sequence
  gi|148679262|gb|EDL11209.1|
MAAPAPRARTGGKKKDERRGFKGYKWEFRDSNKDFWAQGHAECKSLIMLIAAMVCFQRVATHPIVILLLTMELSICAFFFFLYSLAINRYIPFVFWPMMILMGVTAFISIIDLCLQRRQFKSRKLRKFILLTPDRKGKKQDPKLLLMLAAKEDEEERQRELAEKAKRESMDPGW

SEQ ID NO: 1298 - protein, 73 aa, Artificial Sequence
  gi|148678008|gb|EDL09955.1|
MRPAALLLCLTLLHCAGAGFPEDSEPISISHGNYTKQYPVFVGHKPGRNTTQRHRLDIQMIMIMNRTLYVAAR

SEQ ID NO: 1299 - protein, 167 aa, Artificial Sequence
  gi|148677349|gb|EDL09296.1|
MSHGSGLVRTTCSSGGALGPGQPSEGLLDRVYPLTHGALFKVAQMVTLLIAFICVRSSVPIDYGAHSFFEVVTMCDLIMILIFYLVHLFRFYRVLTCISWPLSELLHYLIGTLLLLIASIVIASKSYNQSGLVAGAIFGFLASFLCLASLWLSYKITCITQSSDASA

SEQ ID NO: 1300 - protein, 134 aa, Artificial Sequence
  gi|148677348|gb|EDL09295.1|
MSHGSGLVRTTCSSGGALGPGQPSEGLLDRVYPLTHGALFKVAQMVTLLIAFICVRSSVPIDYGAHSFFEVVTMCDLIMILIFYLVHLFRFYRVLTCISWPLSIFGFLASFLCLASLWLSYKITCITQSSDASA

SEQ ID NO: 1301 - protein, 164 aa, Artificial Sequence
  gi|148677347|gb|EDL09294.1|
MEEQQRARSHTVTTTTSSFAENFSTTSSSFAYDREFLRTPPGLLIVAEIVLGLLVWTLIAGTEYFRVPAFGWVMFVAVFYWVLTVFFLIVYITLTYTRIPQVPWTTVVRTPRGGTCPGCEVGQQVSQGRHLPGAVRWDSRCLFLWIWGHLCSRGAGQCWRSQQQ

SEQ ID NO: 1302 - protein, 210 aa, Artificial Sequence
  gi|38512013|gb|AAH60997.1|  gi|148679263|gb|EDL11210.1|
MAAPAPRARTGGKKKDERRGFKGYKWEFRDSNKDFWAQGHAECKSLIMILLIAAMVCFQRVATHPIVILLLTMELSICAFFFFLYSLAINRYIPFVFWPMMDLMNDLACSTFLIGGIFFALEARRELPVPYLTGMILMGVTAFISIIDLCLQRRQFKSRKLRKFILLTPDRKGKKQDPKLLLMLAAKEDEEERQRELAEKAKRESMDPGW

SEQ ID NO: 1303 - protein, 220 aa, Artificial Sequence
  gi|37589332|gb|AAH58538.1|
MGAPLAAALGALHYLALFLQLGGATRPAGHAPWDNHVSGHALFTETPHDMTARTGEDVEMACSFRGSGSPSYSLEIQWWYLRSHRDWTDKQTWASNQLKASQQEDSGKDATKISVVKVVGSNISHKLRLSRVKPTDEGTYECRVIDFSDGGRGVPRVLCLLIPLPAPPRAPRPRGQPPGEEPGRGPTLLFLIILPGTGSGTPREAEPHQPHAGGCPARQS

SEQ ID NO: 1304 - protein, 156 aa, Artificial Sequence
  gi|29437315|gb|AAH49665.1|  gi|148704368|gb|EDL36315.1|
MFSAWDRRERPPEEGAAAGLQGFGVDKTFLSSLKGILLETELALTFIIFICFTASISAYMAAALLEFLITLAFLFLCATQYYQRFDRLNWPCLDFLRCLSAIVIFLVVSFAAVTSREGAAIAAFVFGIILVSVFAYDAFKIYRTELMPSTTEGDQQ

SEQ ID NO: 1305 - protein, 169 aa, Artificial Sequence
  gi|29437079|gb|AAH49747.1|
MAAPIKFPFRPRGGQPREDTTPKRGLRRYLLELKESNKEFWLSGHAVFKLLSLGCMISALDYFETMLPHPVLILLICMEAAICIFFIFLNTLAINRYIPFVFWPMADIFNSLFSCVFLGGGIYFAFKARRLLPKPYLTAMILMGAAAICSFIDMLLQFQHFRGLRLRKW

SEQ ID NO: 1306 - protein, 208 aa, Artificial Sequence
  gi|28174958|gb|AAH28852.2|  gi|148679266|gb|EDL11213.1|
MRGGEELDGFEGEASSTSMISGASSPYQPTTEPVSQRRGLAGLRCDPDYLRGALGRLKVAQVILALIAFICIETIMECSPCEGLYFFEFVSCSAFVVTGVLLILFSLNLHMRIPQINWNLTDLVNTGLSTFFFFIASIVLAALNHKTGAEIAAVIFGFLATAAYAVSTFLAMQKWRVSVRQQSTNDYIRARTESRDVDSRPEIQRLDT

SEQ ID NO: 1307 - protein, 173 aa, Artificial Sequence
  gi|20380453|gb|AAH27554.1|  gi|148677346|gb|EDL09293.1|
MEEQQRARSHTVTTTTSSFAENFSTTSSSFAYDREFLRTPPGLLIVAEIVLGLLVWTLIAGTEYFRVPAFGWVMFVAVFYWVLTVFFLIVYITLTYTRIPQVPWTTVGLCFNGSAFVLYFSAAIVDASSVSPEKEGHNFNSWAASSFFAFLVTICYAGNTYFSFIAWRSRTAQ

SEQ ID NO: 1308 - protein, 235 aa, Artificial Sequence
  gi|20072584|gb|AAH27127.1|
MGIFLASVGFMFFSVLYVQQGLSSQAKFTELPRNVTATEGQNVEMSCAFQSGSASVYLEIQWWFLRGPEDLEQGTEAAGSQVELLPDRDPDNDGTKISTVKVQGNDISHKLQISKVRKKDEGLYECRVTDANYGELQEHKAQAYLKVNANSHARRMQAFEASPMWLQDTKPRKNASSVVPSSVHNSANQRMHSTSSPQAVAKIPKQSPQSGARIATSHGLSVLLLVCGFVKGALL

SEQ ID NO: 1309 - protein, 183 aa, Artificial Sequence
  gi|20071228|gb|AAH27248.1|  gi|148677351|gb|EDL09298.1|
MENGAVYSPTTEAAPGTGRGARSGLAAYFVLGRLPWHRRILKGLQLLLSLLAFICEEVVSECGLCGGLYFFEFVSCSAFLLSLLLLIVYCTPVHDRVDTGKVKSSDFYITLGTGCVFLLASIIFVSTHSGTSAEIAAIVFGFLASSMFLLDFVVMLCEKLRESPLRKPENNAKVEALTEPLNA

SEQ ID NO: 1310 - protein, 184 aa, Artificial Sequence
  gi|13096862|gb|AAH03230.1|  gi|148878296|gb|AAI45820.1| gi|148877607|gb|AAI45818.1|
MWPPDAEPEPDPESAHGPRSGRTVPGLRALLPARAFLCSLKGRLLLAESGLSFITFICYVVSSASAFLTVPLLEFLLAVYFLFADAMQLNDKWQGLCWPMMDFLRCVTAALIYFVISITAVAKYSDGAYKAAGVFGFFATIVFAIDFYLIFNEVAKFLKQGDSGNETTAHRTEEENSNSDSDSD

SEQ ID NO: 1311 - protein, 38 aa, Artificial Sequence
  gi|554235|gb|AAA39664.1|
PPPSTDSYMVIVAVLGVLGAMAIIGAVVAFVMKRRRNT

SEQ ID NO: 1312 - protein, 298 aa, Artificial Sequence
  gi|4321619|gb|AAD15788.1|
MASLQEANGSTAWPPPTASNISEPHQCLLLLYEDIGSSRVRYWDLLLLIPNVLFFIFLLWKLPLARAKIRVTSSPIFITFYILVFVVALVGIARAVVSMTVSASDAATVADKILWEITRFFLLAIELSVIILGLAFGHLESKSSIKRVLAITTVLSLAYSVTQGTLEILYPDSHLSAEDFNIYGHGGRQFWLVSSCFFFLVYSLVVILPKTPLKERVSLPSRRSFYVYAGILATLNLLQGLGSALLCANIIVGLCCVDATTFLYFSFFAPLIYVAFLRGFFGSEPKILFLLQMPSGRG

SEQ ID NO: 1313 - protein, 296 aa, Artificial Sequence
  gi|211998543|gb|ACJ15283.1|
MDFILLIILSGVFLPDIISLQPIVGQEPGVTLSDEEQYYADEENNTDGNSVALHKLEENEMDTPANEKTGNYYKDIKQYVFTTPNIKGSEVSVTATTNLEFAVKKNYKASKPTASGEEEKPSESSRKTSTPNIPAFWTILSKAVNETAVSMDDKDQFFQPIPASDLNATNEDKLSELEEIKLKLMLGISLMTLVLLIPLLIFCFATLYKLRHLRDKSYESQYSVNPELATLSYFHPTEGSNQTVLTDESSFLPPEETRFLLPEEPGKELIVERGPMQAMNEIDAQLLLNKEGSPSN

SEQ ID NO: 1314 - protein, 337 aa, Artificial Sequence
  gi|211998541|gb|ACJ15282.1|
MDFILLIILSGVFLPDIISLQPIVGQEPGVTLSDEEQYYADEENNTDGNSVALHKLEENEMDTPANEKTGNYYKDIKQYVFTTPNIKGSEVSVTATTNLEFAVKKNYKASKPTASGEEEKPSESSRKTSTPNIPAFWTILSKAVNETAVSMDDKDQFFQPIPASDLNATNEDKLSELEEIKLKLMLGISLMTLVLLIPLLIFCFATLYKLRHLRDKSYESQYSVNPELATLSYFHPTEGVSDTSFSKSADSNSYWVHNSSEMRRSRTRRSKSKPMDFSAGSNQTVLTDESSFLPPEETRFLLPEEPGKELIVERGPMQAMNEIDAQLLLNKEGSPSN

SEQ ID NO: 1315 - protein, 359 aa, Artificial Sequence
  gi|1666647|emb|CAA67893.1|  gi|2494970|sp|P70658.2|CXCR4_MOUSE gi|1666649|emb|CAA67894.1|
MEPISVSIYTSDNYSEEVGSGDYDSNKEPCFRDENVHFNRIFLPTIYFIIFLTGIVGNGLVILVMGYQKKLRSMTDKYRLHLSVADLLFVITLPFWAVDAMADWYFGKFLCKAVHIIYTVNLYSSVLILAFISLDRYLAIVHATNSQRPRKLLAEKAVYVGVWIPALLLTIPDFIFADVSQGDISQGDDRYICDRLYPDSLWMVVFQFQHIMVGLVLPGIVILSCYCIIISKLSHSKGHQKRKALKTTVILILAFFACWLPYYVGISIDSFILLGVIKQGCDFESIVHKWISITEALAFFHCCLNPILYAFLGAKFKSSAQHALNSMSRGSSLKILSKGKRGGHSSVSTESESSSFHSS

SEQ ID NO: 1316 - protein, 216 aa, Artificial Sequence
  gi|15141687|emb|CAC50144.1|
LVDICFTTVIVPQMLVNLLTQRKTILFAQCLTQMYFFVAFGITDSFLLAAMAIDRYVAICNPLHYNTVMSPRRCRLLVVASWAVSHLHSLTHTILMGRLSFCGPNVIHHFFCDVQPLLTLSCSDTSINELLAFTEGSVVIMSPFILLLSLISIFTRTVLRVPSGEGRYKVFSTCGSHLTVVALFYGTIISVYIRPSSTYSVTKDRVVTVIYTVVTP

SEQ ID NO: 1317 - protein, 214 aa, Artificial Sequence
  gi|15141685|emb|CAC50143.1|
LVDIFFSSVTIPKMLANHLLGSKAISFGGCMAQMYFMISLGNTDSYILAAMAYDRAVAISRPLHYATIMSPQLCVLLVAGSWVIANANALPHTLLTARLSFCGNKDVANFYCDITPLLQLSCSDIRFNVKMMYLGVGVFSVPLLCIIISYVRVFSTVLRVPSTKGFLKALSTCGSHLTVVSLYYGTVMGMYFRPLTSYSLKHALITVMYTAVTP

SEQ ID NO: 1318 - protein, 216 aa, Artificial Sequence
  gi|15141727|emb|CAC50166.1|
FADLCFSTTTVPQVLVHFLVKRKTISFAGCSTQIVVLLLVGCTECALLAVMSYDRYVAVCKPLHYSTIMTHWLCVQLAAGSWASGALVSLVDTTFTLRLPYRGNNVINHFFCEPPALLKLASADTYSTEMAIFAMGVVILLAPVSLILTSYWNIISTVIQMQSGEGRLKVFSTCGSHLIVVVLFYGSAIFAYMRPNSKIMNEKDKMISVFYSAVTP

SEQ ID NO: 1319 - protein, 215 aa, Artificial Sequence
  gi|15141721|emb|CAC50163.1|
SVDVCFSSTTVPKVLAIHILRNQAISFSGCLTQLYFLCVFADMDNFLLAVMAYDRFVAICHPLHYTTKMTHQLCAFLVVGSWMVASLNALLHTLLVAQLYFCGDNVIPHFFCEVTPLLKLSCSDTHLNELMILAVAGLIMLAPFVCILLSYILIACAILKISSTGRWKAFSTCGSHLAVVCLFYGTIISLYFNPSSSHSAGRDMAAAMMYTVVTP

SEQ ID NO: 1320 - protein, 216 aa, Artificial Sequence
  gi|15141719|emb|CAC50162.1|  gi|15141725|emb|CAC50165.1| gi|15141723|emb|CAC50164.1|
FVDICFTSTTVPKMLVNIQTQSKAITYADCISQMSVFLVFAELDNFLLAVMAYDRYVAICHPLYYTVIVNQHLCILMVLLSWVVSILHAFLQSSIVLQLTFCGDVKIPHFFCELNQLSQLTCSDSFSSQLIMNLVPVLLAVISFSSILYSYFKIVSSICSISSVQGKYKAFSTCVSHLSIVSLFYSTGLGVYVSSVVIQSSHSAARASVMYTVVTP

SEQ ID NO: 1321 - protein, 216 aa, Artificial Sequence
  gi|15141711|emb|CAC50158.1|
FSDLCFSSVTMPKLLQNMQSQDPSIPYASCLTQMYFFMAFGNMEIYLLVVMAYDRYVAICFPLHYTSIMSPKLCVSLVVLSWVFTILYSMLHTLLLARLSFCEDNVIPHFFCDISALLKLACSDISINELMIFIVGGLDTVIPFLLIVVSYVQIVCSILKFSSTRGIHKVFSTCGSHLSVVSLFYGTIIGVYICPSANNSTVKETVMSLMYTVVTP

SEQ ID NO: 1322 - protein, 216 aa, Artificial Sequence
  gi|15141703|emb|CAC50153.1|
FVDLCQSSVIMPKMLEKFVMVKSVISFAECMAQFYLFDVFAVSECHMLAVMAYDRYVAICNPLLYNVTMSYKVCSWMVVGVYSVGLICATGETVCLLRLLFCKADDINHYFCDLLPLLEQSCSNTFINEILGLSFSSFNTTVPALTILSSYIFIIASILRIPSTEGRSKAFSTCSSHILAVAVFFGSLAFMYLQPSSVSSMDQGKVSSVFYTIVVP

SEQ ID NO: 1323 - protein, 216 aa, Artificial Sequence
  gi|15141701|emb|CAC50152.1|
VVDICYTSSGVPQMLAHFLMEKKTISFALCGTQLFFALTLGGTEFLLLTAMAYDRYVAVCNPLRYTVVMNPRLCMGLAGVSWFVGVVNSAVETAVTMYLPTCGHNVLNHVACETLALVRLACVDITLNQVVILASSVVVLMIPCSLVSLSYAHIVAAIMKIRSTQGRRKAFETCASHLTVVSMSYGMALFTYLQPASTASAEQDKVVVIFYALVTP

SEQ ID NO: 1324 - protein, 216 aa, Artificial Sequence
  gi|15141697|emb|CAC50150.1|  gi|15141715|emb|CAC50160.1| gi|15141699|emb|CAC50151.1|
FTDLCFSTVTMPNFLQNMQSQVSSIPYAGCLAQMYFFLFFGDVESLLLVAMAYDRYVAICFPLHYTRIMSPNLCVSMVLLSWALTTLYAMLHTLLLTRLSFCKNNVIPHFFCDLSALLKLACSDIHINELMIMIIGALVVILPFLLIIVSYAHIVSSILKVPSTRGIHKVFSTCGSHLSVVSLFYGSVIVLYLCPSSNNSTVKDTVMSMMYTVVIP

SEQ ID NO: 1325 - protein, 216 aa, Artificial Sequence
  gi|15141691|emb|CAC50147.1|  gi|15141717|emb|CAC50161.1|
FSDLCFSSVTMPKLLQNIQSQDPSIPYAGCLAQTYFFMVFGDMESFLLVAMAYDRYVAICFPLHYTSIMSPKLCGCLMLLLWMLTTSHAMMHTLLAARLSFCENNVILNFFCDLFVLLKLACSDTYVNELMIFIMSSLLIVIPFFLIVMSYARIIASILKVPSIQGIYKVFSTCGSHLSVVTLFYGTIIGLYLCPSGNNSTVKGTVMAMMYTVVTP

SEQ ID NO: 1326 - protein, 216 aa, Artificial Sequence
  gi|15141689|emb|CAC50146.1|  gi|15141709|emb|CAC50157.1| gi|15141707|emb|CAC50155.1|
FSDLCFSSVTMPKLLQNMQIQDTPISYVACLTQMYFFSVFGSLEIFLLVVLAYDRYVAICLPLQYSSIMSPNLCVCVVVFCWVFIVFYAMFHTLLLARLSFCKNNVIPHFFCDISALLKLACSDVYINELMILILGGFLLVISLLLIIVSYVQIVSSILRISSTRAIHKLFSTCGSHLSVVSLFYGTIIGLYLCPSANNSTEKETAMSLMYTVVTP

SEQ ID NO: 1327 - protein, 214 aa, Artificial Sequence
  gi|15141683|emb|CAC50142.1|
FVDLCFSSVTVPKLLKDLLSAKKTISIEGCLAQVFFVFFPSGTEACLLSVMAYDRYAAICHPLLYGQVMRNELCVRLVVISWGVASLNATIIVLLAVNLDFCGAQTIHHYTCELPALFPLSCSDISITVVVLLCSSLLHGLGTFIPIFFSYARIVSAILSISSTTGRSKAFSTCSSHLAAVTLFFGSGFLCYLMPPSGSSLDLLLSLQYSAVTP

SEQ ID NO: 1328 - protein, 216 aa, Artificial Sequence
  gi|15141681|emb|CAC50141.1|
FSDIGFISTTIPKMLVNIQTQSKSISYAECITQIYFFMLFGGMDILLLTVMAYDRFVAICHPLHYSVIMNPQLSGLLVLVSWFISFSYSLIQSLLMLRLSFCTNQIIKHFYCEYSRALTIACSDTLINHILLYILICVLGFIPFSGILYSYCKIVSSILRIPSTDGKYKAFSTCGSHLSVVSLFYGTGLGVYLSSDVTSSSGKDVVASVMYTVVTP

SEQ ID NO: 1329 - protein, 216 aa, Artificial Sequence
  gi|15141679|emb|CAC50140.1|
FSDLCFSSVTMPKLLQNMQSQDTSISYAGCLTQMYFLLVFGDLESILLLVMAYDRYVAVCFPLHYMSIMSPTLCVCLLVLSWVFTVLYSMLHTLLLSRLSFCEDNLIHHFFCDISALLKLACSDIHINELMIFIMGGLVSIIPFLLIVVSYIQIVYSILKISSAHVLHKIFSTCGSHLSVVSLFYGTIFALYLCPSANNSTVKEISMAMMCTVVTP

SEQ ID NO: 1330 - protein, 216 aa, Artificial Sequence
  gi|15141677|emb|CAC50139.1|
FSDLCFSSVTMPKLLQNMQSQDPSIPYGGCLAQIFFFMLFGDMESFLLVAMAYDRYVAICFPLHYTSIMSPKVCTFLVLLLWILTTPHATMQILLTVRLSFCENNVFLNFFCDIFVLLKLACSDTYVNDLMILIMGGLIIVIPFLLIVISYARIISSTLKVPSTQGIHKVFSTCGSHLSVVSLFYGTIIGLYLCPSGNNFSLKGSAMAMMYTVVTP

SEQ ID NO: 1331 - protein, 216 aa, Artificial Sequence
  gi|15141675|emb|CAC50138.1|  gi|15141695|emb|CAC50149.1|
FSDLCFSSVTMPKLLQNMQSQDSSITYAGCLTQMYFFLLFGDLESFLLVAMAYDRYVAICFPLHYMSIMSPSLCVSLVLLSWVLTTFHAMLHTLLMARLSFCEDNVIPHFFCDMSALLKLSCSDTHVNELVIFVTGGLILVIPFVLILVSYARIVSSILKVPSARGIRKAFSTCGSHLSVVSLFYGAIIGLYLCPSADNSTVKETVMAMMYTVVTP

SEQ ID NO: 1332 - protein, 216 aa, Artificial Sequence
  gi|15141673|emb|CAC50137.1|
FSDFCFSSVTIPKLLQNMQSQVPSIPYAGCLAQMYFFLLFADLESFLLVAMAYDRYVAICFPLHYTSIMSPKLCLCLVALSWLLTTVISLSHTLLMARLSFCANNVIPHFFCDMSALLKLACSDIQINKLMIFILGGLVIIVPFLLIFSSYARIVSSILKVPSSRSIRKAFSTCGSHLSVVSLFYGTIIGLYLRPSANNSTIKETVMAVMYTVVTP

SEQ ID NO: 1333 - protein, 216 aa, Artificial Sequence
  gi|15141671|emb|CAC50136.1|
IADIGFTSTTIPKVLQTIHTQSKFISFSGCITQIFFFIVFGCLDNLLLSVMAYDRFVAICHPLHYVVIMNSCFCVMLALGSWIVSVMSSLPETLTVLRLSFCTNMEIPHFFCDLPEVLKLACSDTLVNNIVTYSITIVIAGFPFSGILLSYSKIFSSILRIPSAGGKYKAFSTCGSHLLVVFLFYSNGLGVYLSSAATSSSRMSLVASLMYSIVTP

SEQ ID NO: 1334 - protein, 216 aa, Artificial Sequence
  gi|15133018|emb|CAC50071.1|  gi|15141713|emb|CAC50159.1| gi|15141705|emb|CAC50154.1|
FTDLCFSSVTMPKLLQNMQSQVPSIPYAGCLTQMYFFLFFGDLESFLLVAMAYDRYVAICFPLHYTSIMSPRLCVSLVLLSWLLTMSHSMLHTLLLTRLSFCENNVIPHFFCDLSALLKLACSDIHINELVILIIGGLVVILPFLLVTVSYARIISSILKVPSTRGIHKVFSTCGSHLSVVSLFYGTIIGLYLCPSANNSTLKDTVMSLMYTVVTP

SEQ ID NO: 1335 - protein, 99 aa, Artificial Sequence
  gi|746829538|gb|AJD80698.1|  gi|751868147|ref|YP_009116921.1|
MKQNKLEFKQNQLLGQNELGQNRLLIRYLLLGQNEFNQNQLLVRNQLLVRKQLLVRYQLRLNQNQLRRCLTALFVTFVALTAFVKINFLFFPTYMHVVL

SEQ ID NO: 1336 - protein, 171 aa, Artificial Sequence
  gi|746829535|gb|AJD80695.1|  gi|751868144|ref|YP_009116918.1|
MEPDLEPAIEPDLEPAIEPDLEPAIEPDLEPVALEPDLEPDLEPALEPDLEPVALEPDLEPVALEPDFELLLSLSLLSLSLLSLLSLSLLSLLSLPLLLSLRLRLIESESIVSSFINLSKSSRFLGSAIISAVEHSPKRLLNSTIRLLLLQFFLLVAFHCCCFQASTLAIL

SEQ ID NO: 1337 - protein, 496 aa, Artificial Sequence
  gi|26008095|ref|NP_742170.1|
AVFSYFVYVCFLLSLVCFIGLWCLMPTYTVHKSDFQLPVYASYKVLDNGVIRDVSVEDVCFANKFEQFDQWYESTFGLSYYSNSMACPIVVAVVDQDLGSTVFNVPTKVLRYGYHVLHFITHALSADGVQCYTPHSQISYSNFYASGCVLSSACTMFAMADGSPQPYCYTEGLMQNASLYSSLVPHVRYNLANAKGFIRFPEVLREGLVRIVRTRSMSYCRVGLCEEADEGICFNFNGSWVLNNDYYRSLPGTFCGRDVFDLIYQLFKGLAQPVDFLALTASSIAGAILAVIVVLVFYYLIKLKRAFGDYTSIVFVNVIVWCVNFMMLFVFQVYPTLSCVYAICYFYATLYFPSEISVIMHLQWLVMYGTIMPLWFCLLYISVVVSNHAFWVFAYCRRLGTSVRSDGTFEEMALTTFMITKDSYCKLKNSLSDVAFNRYLSLYNKYRYYSGKMDTAAYREAACSQLAKAMDTFTNNNGSDVLYQPPTASVSTSFLQ

SEQ ID NO: 1338 - protein, 18 aa, Artificial Sequence
  gi|726968646|pdb|2RUN|A
LGKYEQYIKWPWYVWLGF

SEQ ID NO: 1339 - protein, 123 aa, Artificial Sequence
  gi|505834838|gb|AGM13066.1|  gi|509142736|ref|YP_008061597.1|
MTMPTEESGKPGLFDRFADLINQFTSRAWFFLACVLLVLIWAPSFLVVGNIDTWQLLINTPTTVITFLLVALQANTSKRSDASEQAKLNAIADGLADLMEHFEVTEHAHELREAVGLEEKEST

SEQ ID NO: 1340 - protein, 32 aa, Artificial Sequence
  gi|403071799|pdb|2LX0|A
KKHTIWEVIAGLVALLTFLAFGFWLFKYLQKK

SEQ ID NO: 1341 - protein, 24 aa, Artificial Sequence
  gi|301598521|pdb|3LBW|A  gi|301598524|pdb|3LBW|D gi|301598523|pdb|3LBW|C gi|301598522|pdb|3LBW|
  misc_feature (24)..(24): Xaa can be any naturally occurring amino acid
BPLVVAASIIAILHLILWILDRLX

SEQ ID NO: 1342 - protein, 69 aa, Artificial Sequence
  gi|339272045|emb|CBX88956.1|
MSDPSVEKVSLNAKEIILAIVVSAGAVTALVSAGALWTGHAEIAEKAGLAFVSGIVGFGAGIVTALWGR

SEQ ID NO: 1343 - protein, 88 aa, Artificial Sequence
  gi|339272044|emb|CBX88955.1|
MDHINREEFQNFRQDAGEHFKMLHECDRRIERKIDELAALLEPVLDEHAQSMESRRGRREVKMLAIGAALGAFFSAVTAAMLLLFQLG

SEQ ID NO: 1344 - protein, 120 aa, Artificial Sequence
  anti-CD11c(scFv(N418))-VH(wt)
QVKLQESGGGLVQPGRSLKLSCAASGFTFSNSGMHWIRQSPTKGLEWVASISPSGGTTYYRDSVKGRFTFSRDNAKSTLYLQMDSLRSEDTATYYSATDSGHGYTYFDYWGQGTTVTVSS

SEQ ID NO: 1345 - protein, 110 aa, Artificial Sequence
  anti-CD11c(scFv(N418))-VL(wt)
DIQMTQSPSSLPASLGDRVTIHCQASQDISNYLTWYQQKPGKAPKLLIYETNKLADGVPSRFSGSGSGRDYSFTISSLESEDVGSYYCQHYYDYPRTFGPGTKLEIKRAA

SEQ ID NO: 1346 - protein, 119 aa, Artificial Sequence
  anti-Dec205(scFv(NLDC-145))-VH
EVKLQQSGTEVVKPGASVKLSCKASGYIFTSYDIDWVRQTPEQGLEWIGWIFPGEGSTEYNEKFKGRATLSVDKSSSTAYMELTRLTSEDSAVYFCARGDYYRRYFDLWGQGTTVTVSS

SEQ ID NO: 1347 - protein, 110 aa, Artificial Sequence
  anti-Dec205(scFv(NLDC-148))-VL
DIQMTQSPSFLSTSLGNSITITCHASQNIKGWLAWYQQKSGNAPQLLIYKASSLQSGVPSRFSGSGSGTDYIFTISNLQPEDIATYYCQHYQSFPWTFGGGTKLEIKRAA

SEQ ID NO: 1348 - protein, 157 aa, Artificial Sequence
  soluble PD-1 (uptake by DCs, degradation)_MmPdcd1(1-157,C83S)(wt)
MWVRQVPWSFTWAVLQLSWQSGWLLEVPNGPWRSLTFYPAWLTVSEGANATFTCSLSNWSEDLMLNWNRLSPSNQTEKQAAFSNGLSQPVQDARFQIIQLPNRHDFHMNILDTRRNDSGIYLCGAISLHPKAKIEESPGAELVVTERILETSTRYPS

SEQ ID NO: 1349 - protein, 157 aa, Artificial Sequence
  gi|167857792|ref|NP_005009.2| programmed cell death protein 1 precursor [Homo sapiens]minus_TM
MQIPQAPWPVVWAVLQLGWRPGWFLDSPDRPWNPPTFSPALLVVTEGDNATFTCSFSNTSESFVLNWYRMSPSNQTDKLAAFPEDRSQPGQDCRFRVTQLPNGRDFHMSVVRARRNDSGTYLCGAISLAPKAQIKESLRAELRVTERRAEVPTAHPS

SEQ ID NO: 1350 - protein, 114 aa, Artificial Sequence
  chemokine (C motif) ligand XCL1_musMusculus (uptake by cross presenting DCs,degradation)
MRLLLLTFLGVCCLTPWVVEGVGTEVLEESSCVNLQTQRLPVQKIKTYIIWEGAMRAVIFVTKRGLKICADPEAKWVKAAIKTVDGRASTRKNMAETVPTGAQRSTSTAITLTG

SEQ ID NO: 1351 - protein, 114 aa, Artificial Sequence
  gi|4506853|ref|NP_002986.1| lymphotactin precursor [Homo sapiens]
MRLLILALLGICSLTAYIVEGVGSEVSDKRTCVSLTTQRLPVSRIKTYTITEGSLRAVIFITKRGLKVCADPQATWVRDVVRSMDRKSNTRNNMIQTKPTGTQQSTNTAVTLTG

SEQ ID NO: 1352 - protein, 214 aa, Artificial Sequence
  MmCD40lg(47-260)(wt)
HRRLDKVEEEVNLHEDFVFIKKLKRCNKGEGSLSLLNCEEMRRQFEDLVKDITLNKEEKKENSFEMQRGDEDPQIAAHVVSEANSNAASVLQWAKKGYYTMKSNLVMLENGKQLTVKREGLYYVYTQVTFCSNREPSSQRPFIVGLWLKPSSGSERILLKAANTHSSSQLCEQQSVHLGGVFELQAGASVFVNVTEASQVIHRVGFSSFGLLKL

SEQ ID NO: 1353 - protein, 261 aa, Artificial Sequence
  gi|231718|sp|P29965.1|CD40L_HUMAN RecName: Full=CD40 ligand Short=CD40-L AltName: Full=T-cell antigen Gp39 AltName: Full=TNF-related activation protein Short=TRAP AltName: Full=Tumor necrosis factor ligand superfamily member 5 AltName:
MIETYNQTSPRSAATGLPISMKIFMYLLTVFLITQMIGSALFAVYLHRRLDKIEDERNLHEDFVFMKTIQRCNTGERSLSLLNCEEIKSQFEGFVKDIMLNKEETKKENSFEMQKGDQNPQIAAHVISEASSKTTSVLQWAEKGYYTMSNNLVTLENGKQLTVKRQGLYYIYAQVTFCSNREASSQAPFIASLCLKSPGRFERILLRAANTHSSAKPCGQQSIHLGGVFELQPGASVFVNVTDPSQVSHGTGFTSFGLLKL

SEQ ID NO: 1354 - protein, 149 aa, Artificial Sequence
  MmCD40lg(112-260)(wt)
MQRGDEDPQIAAHVVSEANSNAASVLQWAKKGYYTMKSNLVMLENGKQLTVKREGLYYVYTQVTFCSNREPSSQRPFIVGLWLKPSSGSERILLKAANTHSSSQLCEQQSVHLGGVFELQAGASVFVNVTEASQVIHRVGFSSFGLLKL

SEQ ID NO: 1355 - protein, 261 aa, Artificial Sequence; identical to SEQ ID NO: 1353
  gi|231718|sp|P29965.1|CD40L_HUMAN RecName: Full=CD40 ligand Short=CD40-L AltName: Full=T-cell antigen Gp39 AltName: Full=TNF-related activation protein Short=TRAP AltName: Full=Tumor necrosis factor ligand superfamily member 5 AltName:

SEQ ID NO: 1356 - protein, 227 aa, Artificial Sequence; identical to SEQ ID NO: 1117
  human lgG1 (uptake via fc-receptors / degradation) _ HsIgG1-FcHC(6-232)(wt)

SEQ ID NO: 1357 - protein, 398 aa, Artificial Sequence
  gi|121044|sp|P03987.2|IGHG3_MOUSE RecName: Full=Ig gamma-3 chain C region
TTTAPSVYPLVPGCSDTSGSSVTLGCLVKGYFPEPVTVKWNYGALSSGVRTVSSVLQSGFYSLSSLVTVPSSTWPSQTVICNVAHPASKTELIKRIEPRIPKPSTPPGSSCPPGNILGGPSVFIFPPKPKDALMISLTPKVTCVVVDVSEDDPDVHVSWFVDNKEVHTAWTQPREAQYNSTFRVVSALPIQHQDWMRGKEFKCKVNNKALPAPIERTISKPKGRAQTPQVYTIPPPREQMSKKKVSLTCLVTNFFSEAISVEWERNGELEQDYKNTPPILDSDGTYFLYSKLTVDTDSWLQGEIFTCSVVHEALHNHHTQKNLSRSPELELNETCAEAQDGELDGLWTTITIFISLFLLSVCYSASVTLFKVKWIFSSVVQVKQTAIPDYRNMIGQGA

SEQ ID NO: 1358 - protein, 232 aa, Artificial Sequence; identical to SEQ ID NO: 1119
  murine IgG2a (uptake via fc-receptors / degradation)_ MmIgG2aFc(wt)

SEQ ID NO: 1359 - protein, 330 aa, Artificial Sequence [sequence omitted]

SEQ ID NO: 1360 - protein, 547 aa, Artificial Sequence
  HSP60_fragment_HomoSapiens
AKDVKFGADARALMLQGVDLLADAVAVTMGPKGRTVIIEQSWGSPKVTKDGVTVAKSIDLKDKYKNIGAKLVQDVANNTNEEAGDGTTTATVLARSIAKEGFEKISKGANPVEIRRGVMLAVDAVIAELKKQSKPVTTPEEIAQVATISANGDKEIGNIISDAMKKVGRKGVITVKDGKTLNDELEIIEGMKFDRGYISPYFINTSKGQKCEFQDAYVLLSEKKISSIQSIVPALEIANAHRKPLVIIAEDVDGEALSTLVLNRLKVGLQVVAVKAPGFGDNRKNQLKDMAIATGGAVFGEEGLTLNLEDVQPHDLGKVGEVIVTKDDAMLLKGKGDKAQIEKRIQEIIEQLDVTTSEYEKEKLNERLAKLSDGVAVLKVGGTSDVEVNEKKDRVTDALNATRAAVEEGIVLGGGCALLRCIPALDSLTPANEDQKIGIEIIKRTLKIPAMTIAKNAGVEGSLIVEKIMQSSSEVGYDAMAGDFVNMVEKGIIDPTKVVRTALLDAAGVASLLTTAEVVVTEIPKEEKDPGMGAMGGMGGGMGGGMF

SEQ ID NO: 1361 - protein, 509 aa, Artificial Sequence [sequence omitted]

SEQ ID NO: 1362 - protein, 573 aa, Artificial Sequence
  gi|183396771|ref|NP_034607.3| 60 kDa heat shock protein, mitochondrial [Mus musculus]
MLRLPTVLRQMRPVSRALAPHLTRAYAKDVKFGADARALMLQGVDLLADAVAVTMGPKGRTVIIEQSWGSPKVTKDGVTVAKSIDLKDKYKNIGAKLVQDVANNTNEEAGDGTTTATVLARSIAKEGFEKISKGANPVEIRRGVMLAVDAVIAELKKQSKPVTTPEEIAQVATISANGDKDIGNIISDAMKKVGRKGVITVKDGKTLNDELEIIEGMKFDRGYISPYFINTSKGQKCEFQDAYVLLSEKKISSVQSIVPALEIANAHRKPLVIIAEDVDGEALSTLVLNRLKVGLQVVAVKAPGFGDNRKNQLKDMAIATGGAVFGEEGLNLNLEDVQAHDLGKVGEVIVTKDDAMLLKGKGDKAHIEKRIQEITEQLDITTSEYEKEKLNERLAKLSDGVAVLKVGGTSDVEVNEKKDRVTDALNATRAAVEEGIVLGGGCALLRCIPALDSLKPANEDQKIGIEIIKRALKIPAMTIAKNAGVEGSLIVEKILQSSSEVGYDAMLGDFVNMVEKGIIDPTKVVRTALLDAAGVASLLTTAEAVVTEIPKEEKDPGMGAMGGMGGGMGGGMF

SEQ ID NO: 1363 - protein, 641 aa, Artificial Sequence
  HSP70_MusMusculus
MAKNTAIGIDLGTTYSCVGVFQHGKVEIIANDQGNRTTPSYVAFTDTERLIGDAAKNQVALNPQNTVFDAKRLIGRKFGDAVVQSDMKHWPFQVVNDGDKPKVQVNYKGESRSFFPEEISSMVLTKMKEIAEAYLGHPVTNAVITVPAYFNDSQRQATKDAGVIAGLNVLRIINEPTAAAIAYGLDRTGKGERNVLIFDLGGGTFDVSILTIDDGIFEVKATAGDTHLGGEDFDNRLVSHFVEEFKRKHKKDISQNKRAVRRLRTACERAKRTLSSSTQASLEIDSLFEGIDFYTSITRARFEELCSDLFRGTLEPVEKALRDAKMDKAQIHDLVLVGGSTRIPKVQKLLQDFFNGRDLNKSINPDEAVAYGAAVQAAILMGDKSENVQDLLLLDVAPLSLGLETAGGVMTALIKRNSTIPTKQTQTFTTYSDNQPGVLIQVYEGERAMTRDNNLLGRFELSGIPPAPRGVPQIEVTFDIDANGILNVTATDKSTGKANKITITNDKGRLSKEEIERMVQEAERYKAEDEVQRDRVAAKNALESYAFNMKSAVEDEGLKGKLSEADKKKVLDKCQEVISWLDSNTLADKEEFVHKREELERVCSPIISGLYQGAGAPGAGGFGAQAPKGASGSGPTIEEVD

SEQ ID NO: 1364 - protein, 840 aa, Artificial Sequence
  gi|116496805|gb|AAI26125.1| Heat shock 70kDa protein 4 [Homo sapiens]
MSVVGIDLGFQSCYVAVARAGGIETIANEYSDRCTPACISFGPKNRSIGAAAKSQVISNAKNTVQGFKRFHGRAFSDPFVEAEKSNLAYDIVQLPTGLTGIKVTYMEEERNFTTEQVTAMLLSKLKETAESVLKKPVVDCVVSVPCFYTDAERRSVMDATQIAGLNCLRLMNETTAVALAYGIYKQDLPALEEKPRNVVFVDMGHSAYQVSVCAFNRGKLKVLATAFDTTLGGRKFDEVLVNHFCEEFGKKYKLDIKSKIRALLRLSQECEKLKKLMSANASDLPLSIECFMNDVDVSGTMNRGKFLEMCNDLLARVEPPLRSVLEQTKLKKEDIYAVEIVGGATRIPAVKEKISKFFGKELSTTLNADEAVTRGCALQCAILSPAFKVREFSITDVVPYPISLRWNSPAEEGSSDCEVFSKNHAAPFSKVLTFYRKEPFTLEAYYSSPQDLPYPDPAIAQFSVQKVTPQSDGSSSKVKVKVRVNVHGIFSVSSASLVEVHKSEENEEPMETDQNAKEEEKMQVDQEEPHVEEQQQQTPAENKAESEEMETSQAGSKDKKMDQPPQAKKAKVKTSTVDLPIENQLLWQIDREMLNLYIENEGKMIMQDKLEKERNDAKNAVEEYVYEMRDKLSGEYEKFVSEDDRNSFTLKLEDTENWLYEDGEDQPKQVYVDKLAELKNLGQPIKIRFQESEERPKLFEELGKQIQQYMKIISSFKNKEDQYDHLDAADMTKVEKSTNEAMEWMNNKLNLQNKQSLTMDPVVKSKEIEAKIKELTSTCSPIISKPKPKVEPPKEEQKNAEQNGPVDGQGDNPGPQAAEQGTDTAVPSDSDKKLPEMDID

SEQ ID NO: 1365 - protein, 802 aa, Artificial Sequence
  gp96 (danger signal, heat shock protein)_musMusculus
MRVLWVLGLCCVLLTFGFVRADDEVDVDGTVEEDLGKSREGSRTDDEVVQREEEAIQLDGLNASQIRELREKSEKFAFQAEVNRMMKLIINSLYKNKEIFLRELISNASDALDKIRLISLTDENALAGNEELTVKIKCDKEKNLLHVTDTGVGMTREELVKNLGTIAKSGTSEFLNKMTEAQEDGQSTSELIGQFGVGFYSAFLVADKVIVTSKHNNDTQHIWESDSNEFSVIADPRGNTLGRGTTITLVLKEEASDYLELDTIKNLVRKYSQFINFPIYVWSSKTETVEEPLEEDEAAKEEKEESDDEAAVEEEEEEKKPKTKKVEKTVWDWELMNDIKPIWQRPSKEVEEDEYKAFYKSFSKESDDPMAYIHFTAEGEVTFKSILFVPTSAPRGLFDEYGSKKSDYIKLYVRRVFITDDFHDMMPKYLNFVKGVVDSDDLPLNVSRETLQQHKLLKVIRKKLVRKTLDMIKKIADEKYNDTFWKEFGTNIKLGVIEDHSNRTRLAKLLRFQSSHHSTDITSLDQYVERMKEKQDKIYFMAGSSRKEAESSPFVERLLKKGYEVIYLTEPVDEYCIQALPEFDGKRFQNVAKEGVKFDESEKTKESREATEKEFEPLLNWMKDKALKDKIEKAVVSQRLTESPCALVASQYGWSGNMERIMKAQAYQTGKDISTNYYASQKKTFEINPRHPLIRDMLRRIKEDEDDKTVMDLAVVLFETATLRSGYLLPDTKAYGDRIERMLRLSLNIDPEAQVEEEPEEEPEDTSEDAEDSEQDEGEEMDAGTEEEEEETEKESTEKDEL

SEQ ID NO: 1366 - protein, 803 aa, Artificial Sequence
  gi|44890631|gb|AAH66656.1| Heat shock protein 90kDa beta (Grp94), member 1 [Homo sapiens]
MRALWVLGLCCVLLTFGSVRADDEVDVDGTVEEDLGKSREGSRTDDEVVQREEEAIQLDGLNASQIRELREKSEKFAFQAEVNRMMKLIINSLYKNKEIFLRELISNASDALDKIRLISLTDENALSGNEELTVKIKCDKEKNLLHVTDTGVGMTREELVKNLGTIAKSGTSEFLNKMTEAQEDGQSTSELIGQFGVGFYSAFLVADKVIVTSKHNNDTQHIWESDSNEFSVIADPRGNTLGRGTTITLVLKEEASDYLELDTIKNLVKKYSQFINFPIYVWSSKTETVEEPMEEEEAAKEEKEESDDEAAVEEEEEEKKPKTKKVEKTVWDWELMNDIKPIWQRPSKEVEEDEYKAFYKSFSKESDDPMAYIHFTAEGEVTFKSILFVPTSAPRGLFDEYGSKKSDYIKLYVRRVFITDDFHDMMPKYLNFVKGVVDSDDLPLNVSRETLQQHKLLKVIRKKLVRKTLDMIKKIADDKYNDTFWKEFGTNIKLGVIEDHSNRTRLAKLLRFQSSHHPTDITSLDQYVERMKEKQDKIYFMAGSSRKEAESSPFVERLLKKGYEVIYLTEPVDEYCIQALPEFDGKRFQNVAKEGVKFDESEKTKESREAVEKEFEPLLNWMKDKALKDKIEKAVVSQRLTESPCALVASQYGWSGNMERIMKAQAYQTGKDISTNYYASQKKTFEINPRHPLIRDMLRRIKEDEDDKTVLDLAVVLFETATLRSGYLLPDTKAYGDRIERMLRLSLNIDPDAKVEEEPEEEPEETAEDTTEDTEQDEDEEMDVGTDEEEETAKESTAEKDEL

SEQ ID NO: 1367 - protein, 102 aa, Artificial Sequence
  gi|6996446|emb|CAB75425.1| chaperonin 10, Hsp10 protein [Homo sapiens]
MAGQAFRKFLPLFDRVLVERSAAETVTKGGIMLPEKSQGKVLQATVVAVGSGSKGKGGEIQPVSVKVGDKVLLPEYGGTKVVLDDKDYFLFRDGDILGKYVD

SEQ ID NO: 1368 - protein, 854 aa, Artificial Sequence
  gi|153792590|ref|NP_001017963.2| heat shock protein HSP 90-alpha isoform 1 [Homo sapiens]
MPPCSGGDGSTPPGPSLRDRDCPAQSAEYPRDRLDPRPGSPSEASSPPFLRSRAPVNWYQEKAQVFLWHLMVSGSTTLLCLWKQPFHVSAFPVTASLAFRQSQGAGQHLYKDLQPFILLRLLMPEETQTQDQPMEEEEVETFAFQAEIAQLMSLIINTFYSNKEIFLRELISNSSDALDKIRYESLTDPSKLDSGKELHINLIPNKQDRTLTIVDTGIGMTKADLINNLGTIAKSGTKAFMEALQAGADISMIGQFGVGFYSAYLVAEKVTVITKHNDDEQYAWESSAGGSFTVRTDTGEPMGRGTKVILHLKEDQTEYLEERRIKEIVKKHSQFIGYPITLFVEKERDKEVSDDEAEEKEDKEEEKEKEEKESEDKPEIEDVGSDEEEEKKDGDKKKKKKIKEKYIDQEELNKTKPIWTRNPDDITNEEYGEFYKSLTNDWEDHLAVKHFSVEGQLEFRALLFVPRRAPFDLFENRKKKNNIKLYVRRVFIMDNCEELIPEYLNFIRGVVDSEDLPLNISREMLQQSKILKVIRKNLVKKCLELFTELAEDKENYKKFYEQFSKNIKLGIHEDSQNRKKLSELLRYYTSASGDEMVSLKDYCTRMKENQKHIYYITGETKDQVANSAFVERLRKHGLEVIYMIEPIDEYCVQQLKEFEGKTLVSVTKEGLELPEDEEEKKKQEEKKTKFENLCKIMKDILEKKVEKVVVSNRLVTSPCCIVTSTYGWTANMERIMKAQALRDNSTMGYMAAKKHLEINPDHSIIETLRQKAEADKNDKSVKDLVILLYETALLSSGFSLEDPQTHANRIYRMIKLGLGIDEDDPTADDTSAAVTEEMPPLEGDDDTSRMEEVD

SEQ ID NO: 1369 - protein, 704 aa, Artificial Sequence
  gi|67477458|sp|Q12931.3|TRAP1_HUMAN RecName: Full=Heat shock protein 75 kDa, mitochondrial Short=HSP 75 AltName: Full=TNFR-associated protein 1 AltName: Full=Tumor necrosis factor type 1 receptor-associated protein Short=TRAP-1 Flags:
MARELRALLLWGRRLRPLLRAPALAAVPGGKPILCPRRTTAQLGPRRNPAWSLQAGRLFSTQTAEDKEEPLHSIISSTESVQGSTSKHEFQAETKKLLDIVARSLYSEKEVFIRELISNASDALEKLRHKLVSDGQALPEMEIHLQTNAEKGTITIQDTGIGMTQEELVSNLGTIARSGSKAFLDALQNQAEASSKIIGQFGVGFYSAFMVADRVEVYSRSAAPGSLGYQWLSDGSGVFEIAEASGVRTGTKIIIHLKSDCKEFSSEARVRDVVTKYSNFVSFPLYLNGRRMNTLQAIWMMDPKDVREWQHEEFYRYVAQAHDKPRYTLHYKTDAPLNIRSIFYVPDMKPSMFDVSRELGSSVALYSRKVLIQTKATDILPKWLRFIRGVVDSEDIPLNLSRELLQESALIRKLRDVLQQRLIKFFIDQSKKDAEKYAKFFEDYGLFMREGIVTATEQEVKEDIAKLLRYESSALPSGQLTSLSEYASRMRAGTRNIYYLCAPNRHLAEHSPYYEAMKKKDTEVLFCFEQFDELTLLHLREFDKKKLISVETDIVVDHYKEEKFEDRSPAAECLSEKETEELMAWMRNVLGSRVTNVKVTLRLDTHPAMVTVLEMGAARHFLRMQQLAKTQEERAQLLQPTLEINPRHALIKKLNQLRASEPGLAQLLVDQIYENAMIAAGLVDDPRAMVGRLNELLVKALERH

SEQ ID NO: 1370 - protein, 494 aa, Artificial Sequence
  flagellin FliC_salmonella (danger signal)
AQVINTNSLSLLTQNNLNKSQSALGTAIERLSSGLRINSAKDDAAGQAIANRFTANIKGLTQASRNANDGISIAQTTEGALNEINNNLQRVRELAVQSANSTNSQSDLDSIQAEITQRLNEIDRVSGQTQFNGVKVLAQDNTLTIQVGANDGETIDIDLKQINSQTLGLDTLNVQQKYKVSDTAATVTGYADTTIALDNSTFKASATGLGGTDQKIDGDLKFDDTTGKYYAKVTVTGGTGKDGYYEVSVDKTNGEVTLAGGATSPLTGGLPATATEDVKNVQVANADLTEAKAALTAAGVTGTASVVKMSYTDNNGKTIDGGLAVKVGDDYYSATQNKDGSISINTTKYTADDGTSKTALNKLGGADGKTEVVSIGGKTYAASKAEGHNFKAQPDLAEAAATTTENPLQKIDAALAQVDTLRSDLGAVQNRFNSAITNLGNTVNNLTSARSRIEDSDYATEVSNMSRAQILQQAGTSVLAQANQVPQNVLSLLR

SEQ ID NO: 1371 - protein, 498 aa, Artificial Sequence
  gi|120312|sp|P04949.2|FLIC_ECOLI RecName:
MAQVINTNSLSLITQNNINKNQSALSSSIERLSSGLRINSAKDDAAGQAIANRFTSNIKGLTQAARNANDGISVAQTTEGALSEINNNLQRVRELTVQATTGTNSESDLSSIQDEIKSRLDEIDRVSGQTQFNGVNVLAKNGSMKIQVGANDNQTITIDLKQIDAKTLGLDGFSVKNNDTVTTSAPVTAFGATTTNNIKLTGITLSTEAATDTGGTNPASIEGVYTDNGNDYYAKITGGDNDGKYYAVTVANDGTVTMATGATANATVTDANTTKATTITSGGTPVQIDNTAGSATANLGAVSLVKLQDSKGNDTDTYALKDTNGNLYAADVNETTGAVSVKTITYTDSSGAASSPTAVKLGGDDGKTEVVDIDGKTYDSADLNGGNLQTGLTAGGEALTAVANGKTTDPLKALDDAIASVDKFRSSLGAVQNRLDSAVTNLNNTTTNLSEAQSRIQDADYATEVSNMSKAQIIQQAGNSVLAKANQVPQQVLSLLQG

SEQ ID NO: 1372 - protein, 514 aa, Artificial Sequence
  gi|2506428|sp|Q07911.4|FLAB_HELPY RecName: Full=Flagellin B AltName: Full=Flagellin
MSFRINTNIAALTSHAVGVQNNRDLSSSLEKLSSGLRINKAADDSSGMAIADSLRSQSANLGQAIRNANDAIGMVQTADKAMDEQIKILDTIKTKAVQAAQDGQTLESRRALQSDIQRLLEELDNIANTTSFNGQQMLSGSFSNKEFQIGAYSNATVKASIGSTSSDKIGHVRMETSSFSGAGMLASAAAQNLTEVGLNFKQVNGVNDYKIETVRISTSAGTGIGALSEIINRFSNTLGVRASYNVMATGGTPVQSGTVRELTINGVEIGTVNDVHKNDADGRLTNAINSVKDRTGVEASLDIQGRINLHSIDGRAISVHAASASGQVFGGGNFAGISGTQHAVIGRLTLTRTDARDIIVSGVNFSHVGFHSAQGVAEYTVNLRAVRGIFDANVASAAGANANGAQAETNSQGIGAGVTSLKGAMIVMDMADSARTQLDKIRSDMGSVQMELVTTINNISVTQVNVKAAESQIRDVDFAEESANFSKYNILAQSGSFAMAQANAVQQNVLRLLQ

SEQ ID NO: 1373 - protein, 576 aa, Artificial Sequence
  gi|166215082|sp|P22252.4|FLB_CAMJ8 RecName: Full=Flagellin
MGFRINTNIGALNAHANSVVNSNELDKSLSRLSSGLRINSAADDASGMAIADSLRSQAATLGQAINNGNDAIGILQTADKAMDEQLKILDTIKTKATQAAQDGQSLKTRTMLQADINRLMEELDNIANTTSFNGKQLLSGNFTNQEFQIGASSNQTIKATIGATQSSKIGVTRFETGAQSFTSGVVGLTIKNYNGIEDFKFDNVVISTSVGTGLGALAEEINKSADKTGVRATYDVKTTGVYAIKEGTTSQDFAINGVVIGQINYKDGDNNGQLVSAINAVKDTTGVQASKDENGKLVLTSADGRGIKITGDIGVGSGILANQKENYGRLSLVKNDGRDINISGTNLSAIGMGTTDMISQSSVSLRESKGQISATNADAMGFNSYKGGGKFVFTQNVSSISAFMSAQGSGFSRGSGFSVGSGKNLSVGLSQGIQIISSAASMSNTYVVSAGSGFSSGSGNSQFAALKTTAANTTDETAGVTTLKGAMAVMDIAETAITNLDQIRADIGSVQNQLQVTINNITVTQVNVKAAESTIRDVDFASESANFSKYNILAQSGSYAMSQANAVQQNVLKLLQ

SEQ ID NO: 1374 - protein, 488 aa, Artificial Sequence
  gi|12230914|sp|P72151.2|FLICB_PSEAE RecName: Full=B-type flagellin
MALTVNTNIASLNTQRNLNASSNDLNTSLQRLTTGYRINSAKDDAAGLQISNRLSNQISGLNVATRNANDGISLAQTAEGALQQSTNILQRIRDLALQSANGSNSDADRAALQKEVAAQQAELTRISDTTTFGGRKLLDGSFGTTSFQVGSNAYETIDISLQNASASAIGSYQVGSNGAGTVASVAGTATASGIASGTVNLVGGGQVKNIAIAAGDSAKAIAEKMDGAIPNLSARARTVFTADVSGVTGGSLNFDVTVGSNTVSLAGVTSTQDLADQLNSNSSKLGITASINDKGVLTITSATGENVKFGAQTGTATAGQVAVKVQGSDGKFEAAAKNVVAAGTAATTTIVTGYVQLNSPTAYSVSGTGTQASQVFGNASAAQKSSVASVDISTADGAQNAIAVVDNALAAIDAQRADLGAVQNRFKNTIDNLTNISENATNARSRIKDTDFAAETAALSKNQVLQQAGTAILAQANQLPQAVLSLLR

SEQ ID NO: 1375 - protein, 379 aa, Artificial Sequence
  gi|861212290|gb|AKO75676.1| flagellin [Vibrio cholerae]
MTINVNTNVSAMTAQRYLTKATGELNTSMERLSSGNRINSAKDDAAGLQISNRLTAQSRGLDVAMRNANDGISIAQTAEGAMNESTSILQRMRDLALQSANGTNSASERQALNEESVALQDELNRIAETTSFGGRKLLNGSFGEASFQIGSSSGEAIIMGLTSVRADDFRMGGQSFIAEQPKTKEWGVPPTARDLKFEFTKKDGEAVVLDIIAKDGDDIEELATYINGQTDLFKASVDQEGKLQIFVAEPNIEGNFNISGGLATELGLNGGPGVKTTVQDIDITSVGGSQNAVGIIDAALKYVDSQRADLGAKQNRLSHSISNLSNIQENVEASKSRIKDTDFAKETTQLTKSQILQQAGTSILAQAKQLPNSAISLLQ

SEQ ID NO: 1376 - protein, 369 aa, Artificial Sequence
  gi|342855397|gb|AEL73950.1| flagellin [Yersinia pestis A1122]
MAVINTNSLSLLTQNNLNKSQSSLGTAIERLSSGLRINSAKDDAAGQAIANRFTSNIKGLTQAARNANDGISIAQTTEGSLNEINNNLQRVRELTVQAQNGSNSSSDLDSIQDEISLRLAEIDRVSDQTQFNGKKVLAENTTMSIQVGANDGETIDINLQKIDSKSLGLGSYSVSGVSGALTSLTDTSVTGVTTTTALDFSDISTFAKGATVHGIGDVGTDGAYADGYVIRTTDGKQYKGEVDATNGKVTFADDANGDPIDDATKLEAAAQFSPAGKATASPLETLDDAIKQVDGLRSSLGAVQNRFESAVTNLNNTVTNLTSARSRIEDADYATEVSNMSRAQILQQAGTSVLSQANQVPQTVLSLLN

SEQ ID NO: 1377 - protein, 524 aa, Artificial Sequence
  gi|391894|dbj|BAA04095.1| flagellin [Shigella sonnei]
MAQVINTNSLSLLTQNNLNKSQSSLSSAIERLSSGLRINSAKDDAAGQAIANRFTANIKGLTQASRNANDGISVAQTTEGALSEINNNLQRIRELSVQATNGTNSDSDLNSIQDEITQRLSEIDRVSNQTQFNGVKVLASDQTMKIQVGANDGETIEIALDKIDAKTLGLDNFSVALGKVPMSSAVALKSEAAPDLTKVNATDGSVGGAKAFGSNYKNADVETYFGTGNVQDTKDTTDATGTAGTKVYQVQVEGQTYFVGQDNNTNTNGFTLLKQNSTGYEKVQVGGKDVQLANFGGRVTAFVEDNGSATSVDLAAGKMGKALAYNDAPMSVYFGGKNLDVHQVQDTQGNPVPNSFAAKTSDGTYIAVNVDAATGNTSVITDPNGKAVEWAVKNDGSAQAIMREDDKVYTANITNKTATKGAELSASDLKALATTNPLSKLDEALAKVDKLRSSLGAVQNRFDSAITNLGNTVNDLSSARSRIEDADYATEVSNMSRAQILQQAGTSVLAQANQTTQNVLSLLR

SEQ ID NO: 1378 - protein, 96 aa, Artificial Sequence
  HMGN1 (danger signal)_musMusculus
MPKRKVSADGAAKAEPKRRSARLSAKPAPAKVDAKPKKAAGKDKASDKKVQIKGKRGAKGKQADVADQQTTELPAENGETENQSPASEEEKEAKSD

SEQ ID NO: 1379 - protein, 293 aa, Artificial Sequence
  gi|119630061|gb|EAX09656.1| high-mobility group nucleosome binding domain 1, isoform CRA_g [Homo sapiens]
MGGGGGRPGRRGGGARGRGRGGRRRRAPNPVPSGSPTAPAVGLSSSGGGRSGSGKAAQFREGCRRAAARRHPARAFPAGTRHAPSPPPRCPRGRSAPPKAPPRKSPRGDRRGCQLNLLQKWKRSRKRQQRRINLQTKKCKQKGKGEQRENRPKWLTKKLKKTYLRKTGKRRLRRVQPLMKQERKKPSLINNHIPCLISGPCLPSCTIQRNIFINYFVNASFLVALETFLRRRESHLIPFFKCKCFFLRGEIICWLFIFWYNQKIVWDIELWEALTVSGVSLTFHRWGVSFYIL

SEQ ID NO: 1380 - protein, 89 aa, Artificial Sequence
  EDA (extra domain A of fibronectin) (danger signal, TLR4 activation)_musMusculus
IDRPKGLAFTDVDVDSIKIAWESPQGQVSRYRVTYSSPEDGIRELFPAPDGEDDTAELQGLRPGSEYTVSVVALHDDMESQPLIGIQST

SEQ ID NO: 1381 - protein, 111 aa, Artificial Sequence
  Human C3 protein fragment
DKACEPGVDYVYKTRLVKVQLSNDFDEYIMAIEQTIKSGSDEVQVGQQRTFISPIKCREALKLEEKKHYLMWGLSSDFWGEKPNLSYIIGKDTWVEHWPEEDECQDEENQK

SEQ ID NO: 1382 - protein, 152 aa, Artificial Sequence
  C3d-P28
GGGGSGGGGSKFLTTAKDKNRWEDPGKQLYNVEATSYAGGGGSGGGGSKFLTTAKDKNRWEDPGKQLYNVEATSYAGGGGSGGGGSKFLTTAKDKNRWEDPGKQLYNVEATSYAGGGGSGGGGSKFLTTAKDKNRWEDPGKQLYNVEATSYA

SEQ ID NO: 1383 - protein, 698 aa, Artificial Sequence
  gi|339453|gb|AAA61140.1| transferrin precursor [Homo sapiens]
MRLAVGALLVCAVLGLCLAVPDKTVRWCAVSEHEATKCQSFRDHMKSVIPSDGPSVACVKKASYLDCIRAIAANEADAVTLDAGLVYDAYLAPNNLKPVVAEFYGSKEDPQTFYYAVAVVKKDSGFQMNQLRGKKSCHTGLGRSAGWNIPIGLLYCDLPEPRKPLEKAVANFFSGSCAPCADGTDFPQLCQLCPGCGCSTLNQYFGYSGAFKCLKDGAGDVAFVKHSTIFENLANKADRDQYELLCLDNTRKPVDEYKDCHLAQVPSHTVVARSMGGKEDLIWELLNQAQEHFGKDKSKEFQLFSSPHGKDLLFKDSAHGFLKVPPRMDAKMYLGYEYVTAIRNLREGTCPEAPTDECKPVKWCALSHHERLKCDEWSVNSVGKIECVSAETTEDCIAKIMNGEADAMSLDGGFVYIAGKCGLVPVLAENYNKSDNCEDTPEAGYFAVAVVKKSASDLTWDNLKGKKSCHTAVGRTAGWNIPMGLLYNKINHCRFDEFFSEGCAPGSKKDSSLCKLCMGSGLNLCEPNNKEGYYGYTGAFRCLVEKGDVAFVKHQTVPQNTGGKNPDPWAKNLNEKDYELLCLDGTRKPVEEYANCHLARAPNHAVVTRKDKEACVHKILRQQQHLFGSNVTDCSGNFCLFRSETKDLLFRDDTVCLAKLHDRNTYEKYLGEEYVKAVGNLRKCSTSSLLEACTFRRP

SEQ ID NO: 1384 - protein, 71 aa, Artificial Sequence
  Murine beta-defensin2
MRTLCSLLLICCLLFSYTTPAVGSLKSIGYEAELDHCHTNGGYCVRAICPPSARRPGSCFPEKNPCCKYMK

SEQ ID NO: 1385 - protein, 64 aa, Artificial Sequence
  gi|3510600|gb|AAC33549.1| beta-defensin 2 [Homo sapiens]
MRVLYLLFSFLFIFLMPLPGVFGGIGDPVTCLKSGAICHPVFCPRRYKQIGTCGLPGTKCCKKP

SEQ ID NO: 1386 - protein, 114 aa, Artificial Sequence; identical to SEQ ID NO: 1350
  MmXcl1 (lymphotactin precursor, chemokine (C motif) ligand 1 (Xcl1))

SEQ ID NO: 1387 - protein, 114 aa, Artificial Sequence; identical to SEQ ID NO: 1351
  gi|4506853|ref|NP_002986.1| lymphotactin precursor [Homo sapiens]

SEQ ID NO: 1388 - protein, 153 aa, Artificial Sequence
  gi|1836111|gb|AAB46883.1| interleukin-2 [Homo sapiens]
MYRMQLLSCIALSLALVTNSAPTSSSTKKTQLQLEHLLLDLQMILNGINNYKNPKLTRMLTFKFYMPKKATELKHLQCLEEELKPLEEVLNLAQSKNFHLRPRDLISNINVIVLELKGSETTFMCEYADETATIVEFLNRWITFCQSIISTLT

SEQ ID NO: 1389 - protein, 253 aa, Artificial Sequence
  gi|4323579|gb|AAD16432.1| interleukin 12 [Homo sapiens]
MWPPGSASQPPPSPAAATGLHPAARPVSLQCRLSMCPARSLLLVATLVLLDHLSLARNLPVATPDPGMFPCLHHSQNLLRAVSNMLQKARQTLEFYPCTSEEIDHEDITKDKTSTVEACLPLELTKNESCLNSRETSFITNGSCLASRKTSFMMALCLSSIYEDLKMYQVEFKTMNAKLLMDPKRQIFLDQNMLAVIDELMQALNFNSETVPQKSSLEEPDFYKTKIKLCILLHAFRIRAVTIDRVMSYLNAS

SEQ ID NO: 1390 - protein, 162 aa, Artificial Sequence
  i|71680278|gb|AAI00964.1| Interleukin 15 [Homo sapiens]
MRISKPHLRSISIQCYLCLLLNSHFLTEAGIHVFILGCFSAGLPKTEANWVNVISDLKKIEDLIQSMHIDATLYTESDVHPSCKVTAMKCFLLELQVISLESGDASIHDTVENLIILANNSLSSNGNVTESGCKECEELEEKNIKEFLQSFVHIVQMFINTS

SEQ ID NO: 1391 - protein, 193 aa, Artificial Sequence
  gi|15430290|gb|AAK95950.1| interleukin 18 [Homo sapiens]
MAAEPVEDNCINFVAMKFIDNTLYFIAEDDENLESDYFGKLESKLSVIRNLNDQVLFIDQGNRPLFEDMTDSDCRDNAPRTIFIISMYKDSQPRGMAVTISVKCEKISTLSCENKIISFKEMNPPDNIKDTKSDIIFFQRSVPGHDNKMQFESSSYEGYFLACEKERDLFKLILKKEDELGDRSIMFTVQNED

SEQ ID NO: 1392 - protein, 162 aa, Artificial Sequence
  gi|119625631|gb|EAX05226.1| interleukin 21 [Homo sapiens]
MRSSPGNMERIVICLMVIFLGTLVHKSSSQGQDRHMIRMRQLIDIVDQLKNYVNDLVPEFLPAPEDVETNCEWSAFSCFQKAQLKSANTGNNERIINVSIKKLKRKPPSTNAGRRQKHRLTCPSCDSYEKKPPKEFLERFKSLLQKMIHQHLSSRTHGSEDS

SEQ ID NO: 1393 - protein, 144 aa, Artificial Sequence
  gi|183364|gb|AAA52578.1| GM-CSF [Homo sapiens]
MWLQSLLLLGTVACSISAPARSPSPSTQPWEHVNAIQEARRLLNLSRDTAAEMNETVEVISEMFDLQEPTCLQTRLELYKQGLRGSLTKLKGPLTMMASHYKQHCPPTPETSCATQIITFESFKENLKDFLLVIPFDCWEPVQE

SEQ ID NO: 1394 - protein, 233 aa, Artificial Sequence
  gi|37210|emb|CAA26669.1| TNF-alpha [Homo sapiens]
MSTESMIRDVELAEEALPKKTGGPQGSRRCLFLSLFSFLIVAGATTLFCLLHFGVIGPQREEFPRDLSLISPLAQAVRSSSRTPSDKPVAHVVANPQAEGQLQWLNRRANALLANGVELRDNQLVVPSEGLYLIYSQVLFKGQGCPSTHVLLTHTISRIAVSYQTKVNLLSAIKSPCQRETPEGAEAKPWYEPIYLGGVFQLEKGDRLSAEINRPDYLDFAESGQVYFGIIAL

SEQ ID NO: 1395 - protein, 212 aa, Artificial Sequence
  i|186352|gb|AAC41704.1| interleukin 6 [Homo sapiens]
MNSFSTSAFGPVAFSLGLLLVLPAAFPAPVPPGEDSKDVAAPHRQPLTSSERIDKQIRYILDGISALRKETCNKSNMCESSKEALAENNLNLPKMAEKDGCFQSGFNEETCLVKIITGLLEFEVYLEYLQNRFESSEEQARAVQMSTKVLIQFLQKKAKNLDAITTPDPTTNASLLTKLQAQNQWLQDMTTHLILRSFKEFLQSSLRALRQM

SEQ ID NO: 1396 - protein, 253 aa, Artificial Sequence; identical to SEQ ID NO: 1389
  gi|4323579|gb|AAD16432.1| interleukin 12 [Homo sapiens]

SEQ ID NO: 1397 - protein, 248 aa, Artificial Sequence [sequence omitted]

SEQ ID NO: 1398 - protein, 376 aa, Artificial Sequence
  gi|119609094|gb|EAW88688.1| complement component 1, r subcomponent, isoform CRA_a [Homo sapiens]
MWLLYLLVPALFCRAGGSIPIPQKLFGEVTSPLFPKPYPNNFETTTVITVPTGYRVKLVFQQFDLEPSEGCFYDYVKISADKKSLGRFCGQLGSPLGNPPGKKEFMSQGNKMLLTFHTDFSNEENGTIMFYKGFLAYYQAVDLDECASRSKSGEEDPQPQCQHLCHNYVGGYFCSCRPGYELQEDRHSCQAECSSELYTEASGYISSLEYPRSYPPDLRCNYSIRVERGLTLHLKFLEPFDIDDHQQVHCPYDQLQIYANGKNIGEFCGKQRPPDLDTSSNAVDLLFFTDESGDSRGWKLRYTTEIIKCPQPKTLDEFTIIQNLQPQYQFRDYFIATCKQGYQLIEGCTPAQHRAFGRMNRRERRFLGACQCVGSP

SEQ ID NO: 1399 - protein, 258 aa, Artificial Sequence
  gi|1619719|gb|AH003719.1| complement component C1s [Homo sapiens]
EPTMYGEILSPNYPQAYPSEVEKSWDIEVPEGYGIHLYFTHLDIELSENCAYDSVQIISGDTEEGRSSNNPHSPIVEEFQVPYNKFTGFAAYYVATDINECTDFVDVPCSHFCNNFIGGYFCSCPPEYFLHDDMKNCGVNCSGDVFTALIGEIASPNYPKPYPENSRCEYQIRQFGPYCGHGFPGPLNIETKYHGDPMPCPKYVFRVGATSFYSTCQSNGKYTCEEPYYYMENGGGGEYHCAGNGSWVNEVLGPELPK

SEQ ID NO: 1400 - protein, 388 aa, Artificial Sequence
  gi|21358852|gb|AAM47024.1| complement C4b binding protein CR-1 like, partial [Homo sapiens]
IGTYLNYECRPGYSGRPFSIICLKNSVWTSAKDKCKRKSCRNPPDPVNGMAHVIKDIQFRSQIKYSCPKGYRLIGSSSATCIISGNTVIWDNKTPVCDRIICGLPPTIANGDFTSISREYFHYGSVVTYHCNLGSRGKKVFELVGEPSIYCTSKDDQVGIWSGPAPQCIIPNKCTPPNVENGILVSDNRSLFSLNEVVEFRCQPGFGMKGPSHVKCQALNKWEPELPSCSRVCQPPPDVLHAERTQRDKDNFSPGQEVFYSCEPGYDLRGSTYLHCTPQGDWSPAAPRCEVKSCDDFLGQLPNGHVLFPLNLQLGAKVDFVCDEGFQLKGSSASYCVLAGMESLWNSSVPVCERKSCETPPVPVNGMVHVITDIHVGSRINYSCTTGF

SEQ ID NO: 1401 - protein, 500 aa, Artificial Sequence
  gi|124096|sp|P05155.2|IC1_HUMAN RecName: Full=Plasma protease C1 inhibitor Short=C1 Inh Short=C1Inh AltName: Full=C1 esterase inhibitor AltName: Full=C1-inhibiting factor AltName: Full=Serpin G1 Flags: Precursor
MASRLTLLTLLLLLLAGDRASSNPNATSSSSQDPESLQDRGEGKVATTVISKMLFVEPILEVSSLPTTNSTTNSATKITANTTDEPTTQPTTEPTTQPTIQPTQPTTQLPTDSPTQPTTGSFCPGPVTLCSDLESHSTEAVLGDALVDFSLKLYHAFSAMKKVETNMAFSPFSIASLLTQVLLGAGENTKTNLESILSYPKDFTCVHQALKGFTTKGVTSVSQIFHSPDLAIRDTFVNASRTLYSSSPRVLSNNSDANLELINTWVAKNTNNKISRLLDSLPSDTRLVLLNAIYLSAKWKTTFDPKKTRMEPFHFKNSVIKVPMMNSKKYPVAHFIDQTLKAKVGQLQLSHNLSLVILVPQNLKHRLEDMEQALSPSVFKAIMEKLEMSKFQPTLLTLPRIKVTTSQDMLSIMEKLEFFDFSYDLNLCGLTEDPDLQVSAMQHQTVLELTETGVEAAAASAISVARTLLVFEVQQPFLFVLWDQQHKFPVFMGRVYDPRA

SEQ ID NO: 1402 - protein, 597 aa, Artificial Sequence
  gi|416733|sp|P04003.2|C4BPA_HUMAN RecName: Full=C4b-binding protein alpha chain Short=C4bp AltName: Full=Proline-rich protein Short=PRP Flags: Precursor
MHPPKTPSGALHRKRKMAAWPFSRLWKVSDPILFQMTLIAALLPAVLGNCGPPPTLSFAAPMDITLTETRFKTGTTLKYTCLPGYVRSHSTQTLTCNSDGEWVYNTFCIYKRCRHPGELRNGQVEIKTDLSFGSQIEFSCSEGFFLIGSTTSRCEVQDRGVGWSHPLPQCEIVKCKPPPDIRNGRHSGEENFYAYGFSVTYSCDPRFSLLGHASISCTVENETIGVWRPSPPTCEKITCRKPDVSHGEMVSGFGPIYNYKDTIVFKCQKGFVLRGSSVIHCDADSKWNPSPPACEPNSCINLPDIPHASWETYPRPTKEDVYVVGTVLRYRCHPGYKPTTDEPTTVICQKNLRWTPYQGCEALCCPEPKLNNGEITQHRKSRPANHCVYFYGDEISFSCHETSRFSAICQGDGTWSPRTPSCGDICNFPPKIAHGHYKQSSSYSFFKEEIIYECDKGYILVGQAKLSCSYSHWSAPAPQCKALCRKPELVNGRLSVDKDQYVEPENVTIQCDSGYGVVGPQSITCSGNRTWYPEVPKCEWETPEGCEQVLTGKRLMQCLPNPEDVKMALEVYKLSLEIEQLELQRDSARQSTLDKEL

SEQ ID NO: 1403 - protein, 369 aa, Artificial Sequence
  gi|262938|gb|AAB24802.1| membrane cofactor protein [Homo sapiens]
MEPPGRRECPFPSWRFPGLLLAAMVLLLYSFSDACEEPPTFEAMELIGKPKPYYEIGERVDYKCKKGYFYIPPLATHTICDRNHTWLPVSDDACYRETCPYIRDPLNGQAVPANGTYEFGYQMHFICNEGYYLIGEEILYCELKGSVAIWSGKPPICEKVLCTPPPKIKNGKHTFSEVEVFEYLDAVTYSCDPAPGPDPFSLIGESTIYCGDNSVWSRAAPECKVVKCRFPVVENGKQISGFGKKFYYKATVMFECDKGFYLDGSDTIVCDSNSTWDPPVPKCLKGPRPTYKPPVSNYPGYPKPEEGILDSLDVWVIAVIVIAIVVGVAVICVVPYRYLQRRKKKGKADGGAEYATYQTKSTTPAEQRG

SEQ ID NO: 1404 - protein, 381 aa, Artificial Sequence
  gi|10835143|ref|NP_000565.1| complement decay-accelerating factor isoform 1 preproprotein [Homo sapiens]
MTVARPSVPAALPLLGELPRLLLLVLLCLPAVWGDCGLPPDVPNAQPALEGRTSFPEDTVITYKCEESFVKIPGEKDSVICLKGSQWSDIEEFCNRSCEVPTRLNSASLKQPYITQNYFPVGTVVEYECRPGYRREPSLSPKLTCLQNLKWSTAVEFCKKKSCPNPGEIRNGQIDVPGGILFGATISFSCNTGYKLFGSTSSFCLISGSSVQWSDPLPECREIYCPAPPQIDNGIIQGERDHYGYRQSVTYACNKGFTMIGEHSIYCTVNNDEGEWSGPPPECRGKSLTSKVPPTVQKPTTVNVPTTEVSPTSQKTTTKTTTPNAQATRSTPVSRTTKHFHETTPNKGSGTTSGTTRLLSGHTCFTLTGLLGTLVTMGLLT

SEQ ID NO: 1405 - protein, 328 aa, Artificial Sequence
  gi|24497438|ref|NP_002178.2| interleukin-12 subunit beta precursor [Homo sapiens]
MCHQQLVISWFSLVFLASPLVAIWELKKDVYVVELDWYPDAPGEMVVLTCDTPEEDGITWTLDQSSEVLGSGKTLTIQVKEFGDAGQYTCHKGGEVLSHSLLLLHKKEDGIWSTDILKDQKEPKNKTFLRCEAKNYSGRFTCWWLTTISTDLTFSVKSSRGSSDPQGVTCGAATLSAERVRGDNKEYEYSVECQEDSACPAAEESLPIEVMVDAVHKLKYENYTSSFFIRDIIKPDPPKNLQLKPLKNSRQVEVSWEYPDTWSTPHSYFSLTFCVQVQGKSKREKKDRVFTDKTSATVICRKNASISVRAQDRYYSSSWSEWASVPCS

SEQ ID NO: 1406 - protein, 211 aa, Artificial Sequence [sequence omitted]

SEQ ID NO: 1407 - protein, 196 aa, Artificial Sequence
  gi|672560689|gb|KFH01962.1| profilin [Toxoplasma gondii VAND]
MAAFSAALAATRSSSPSVGPVSSAAGRDGFCAPYESSTTSSPMLPASIPTNKELLSLLLQQQDWKDAAVFRALDGAILASTFPLTVEETQGIAAIFDSDRFTAVGKGILLQGERYEVFCFHPPLIYGRRGSGANSEGIALVRGVGPDAESLIVMATYSPPMVSACVVPQLTTFFRAYLGLIPPIAVPPLYEKFRKH

SEQ ID NO: 1408 - protein, 150 aa, Artificial Sequence
  gi|686627215|ref|XP_009307035.1| profilin [Trypanosoma grayi]
MSWQAYVDDSLIGSGYMHSATIVGLRDGSVWAYGGTYIPQQKEIAHILKCLENLSLVQSSGITICNVKFFGLQSGVDGQMKYIFFKKGAAGGCIYTSKQAAIISVYGNPADASSLQQDLAKAGTADVAVNPADCNSTVKRIAEYLISLEY

SEQ ID NO: 1409 - protein, 360 aa, Artificial Sequence
  gi|162353671|gb|ABX87619.1| outer membrane protein F [Yersinia pestis Angola]
MMKRNILAVVIPALLAAGAANAAEIYNKDGNKLDLYGKVDARHSFSDNNKQDGDKSYVRFGFKGETQITDQLTGYGQWEYNIQANNAEDTGAQDGNATRLGFAGLKFAEFGSFDYGRNYGVIYDVNAWTDMLPVFGGDSISNSDNFMTGRSTGLATYRNNNFFGLVDGLNFALQYQGKNDRSEVKEANGDGFGIGSTYDIGNGINFGAGFSSSNRTLDQKYGSTAEGDKAQAWNVGAKYDANNVYLAVMYAETQNLTPYGSFSDTIANKTRDIEITAQYQFDFGLRPSLGYVQSKGKDLNDVDANHDLLKYVSVGTYYYFNKNMSTYVDYKINLLDEDEFTIANGLNTDNVVAVGLVYQF

SEQ ID NO: 1410 - protein, 363 aa, Artificial Sequence
  gi|468741|emb|CAA83471.1| outer membrane protein (OmpF) [Salmonella enterica subsp. enterica serovar Typhimurium]
MMKRKILAAVIPALLAAATANAAEIYNKDGNKLDLYGKAVGRHVWTTTGDSKNADQTYAQIGFKGETQINTDLTGFGQWEYRTKADRAEGEQQNSNLVRLAFAGLKYAEVGSIDYGRNYGIVYDVESYTDMAPYFSGETWGGAYTDNYMTSRAGGLLTYRNSDFFGLVDGLSFGIQYQGKNQDNHSINSQNGDGVGYTMAYEFDGFGVTAAYSNSKRTNDQQDRDGNGDRAASWAVGAKYDANNVYLAAVYAETRNMSIVENTVTDTVEMANKTQNLEVVAQYQFDFGLRPAISYVQSKGKQLNGAGGSADLAKYIQAGATYYFNKNMNVWVDYRFNLLDENDYSSSYVGTDDQAAVGIVYQF

SEQ ID NO: 1411 - protein, 241 aa, Artificial Sequence
  gi|33592379|ref|NP_880023.1| toxin [Bordetella pertussis Tohama I]
MKRISPRAGWLAASLLCLLLPGARAWAASELILVRGYGNCPSGYAPLTYDQAHRPSLRARMRELSGNEPWPIHGLADGQYLGGKYGGELKRARLADIRGLRDHFCLASGSDGAIGRGVHAWGHVPGWGAWQWRRTLPPATGLGHYSNVRVARLDDLPFGDLCAVFTRDGNPVVQACISPQAGRLHRESYATLRRALETLRRQGLPLRVYVDHDRRPDFAAVPDVPAYSITGLATCNRGGCM

SEQ ID NO: 1412 - protein, 1706 aa, Artificial Sequence
  gi|66820294|gb|AAY57201.1| adenylate cyclase toxin [Bordetella hinzii LMG 13501]
MQQSHQAGYANAADRESGIPAAVLDGIKAVAKEKNATLMFRLVNPHSTSLIAEGVATKGLGVHAKSSDWGLQAGYIPVNPNLSKLFGRAPEVIARADNDVNSSLAHGHTAVDLTLSKERLDYLRQAGLVTGMADGVVASNHAGYEQFEFRVKETSDGRYAVQYRRKGGDDFEAVKVIGNAAGIPLTADIDMFAIMPHLSNFRDSARSSVTSGDSVTDYLARTRRAASEATGGLDRERIDLLWKIARAGARSAVGTEARRQFRYDGDMNIGVITDFELEVRNALNRRAHAVGAQDVVQHGTEQNNPFPEADEKIFVVSATGESQMLTRGQLKEYIGQQRGEGYVFYENRAYGVAGKSLFDDGLGAAPGVPSGRSKFSPDVLETVPASPGLRRPSLGAVERQDSGYDSLDGVGSRSFSLGEVSDMAAVEAAELEMTRQVLHAGARQDDAEPGVSGASAHWGQRALQGAQAVAAAQRLVHAIALMTQFGRAGSTNTPQEAASLSAAVFGLGEASSAVAETVSGFFRGSSRWAGGFGVAGGAMALGGGIAAAVGAGMSLTDDAPAGQKAAAGAEIALQLTGGTVELASSIALALAAARGVTSGLQVAGASAGAAAGALAAALSPMEIYGLVQQSHYADQLDKLAQESSAYGYEGDALLAQLYRDKTAAEGAVAGVSAVLSTVGAAVSIAAAASVVGAPVAVVTSLLTGALNGILRGVQQPIIEKLANDYARKIDELGGPQAYFEKNLQARHEQLANSDGLRKMLADLQAGWNASSVIGVQTTEISKSALELAAITGNADNLKSVDVFVDRFVQGERVAGQPVVLDVAAGGIDIASRKGERPALTFITPLAAPGEEQRRRTKTGKSEFTTFVEIVGKQDRWRIRDGAADTTIDLAKVVSQLVDANGVLKHSIKLDVIGGDGDDVVLANASRIHYDGGAGTNTVSYAALGRQDSITVSADGERFNVRKQLNNANVYREGVATQTTAYGKRTENVQYRHVELARVGQLVEVDTLEHVQHIIGGAGNDSITGNAHDNFLAGGSGDDRLDGGAGNDTLVGGEGQNTVIGGAGDDVFLQDLGVWSNQLDGGAGVDTVKYNVHQPSEERLERMGDTGIHADLQKGTVEKWPALNLFSVDHVKNIENLHGSRLNDRIAGDDQDNELWGHDGNDTIRGRGGDDILRGGLGLDTLYGEDGNDIFLQDDETVSDDIDGGAGLDTVDYSAMIHPGRIVAPHEYGFGIEADLSREWVRKASALGVDYYDNVRNVENVIGTSMKDVLIGDAQANTLMGQGGDDTVRGGDGDDLLFGGDGNDMLYGDAGNDTLYGGLGDDTLEGGAGNDWFGQTQAREHDVLRGGDGVDTVDYSQTGAHAGIAAGRIGLGILADLGAGRVDKLGEAGSSAYDTVSGIENVVGTELADRITGDAQANVLRGAGGADVLAGGEGDDVLLGGDGDDQLSGDAGRDRLYGEAGDDWFFQDAANAGNLLDGGDGRDTVDFSGPGRGLDAGAKGVFLSLGKGFASLMDEPETSNVLRNIENAVGSARDDVLIGDAGANVLNGLAGNDVLSGGAGDDVLLGDEGSDLLSGDAGNDDLFGGQGDDTYLFGVGYGHDTIYESGGGHDTIRINAGADQLWFARQGNDLEIRILGTDDALTVHDWYRDADHRVEIIHAANQAVDQAGIEKLVEAMAQYPDPGAAAAAPPAARVPDTLMQSLAVNWR

SEQ ID NO: 1413 - protein, 185 aa, Artificial Sequence
  gi|144042|gb|AAA22971.1| cyaC [Bordetella pertussis]
MLPSAQAPSLLNPTDDFAALGNIAWLWMNSPMHRDWPVHLLARNTLAPIQLGQYILLRCNDVPVAYCSWALMDADTELSYVMAPSSLGGNAWNCGDRLWIIDWIAPFSRDDNRALRRALAERHPDSVGRSLRVRRGGDTARVKEYRGRALDAAATRAQLDRYHAELIAGLRASNGGYAPRGRGTA

SEQ ID NO: 1414 - protein, 573 aa, Artificial Sequence
  gi|144921|gb|AAA23282.1| tetanus toxin, partial [Clostridium tetani]
RSLEYQVDAIKKIIDYEYKIYSGPDKEQIADEINNLKNKLEEKANKAMININIFMRESSRSFLVNQMINEAKKQLLEFDTQSKNILMQYIKANSKFIGITELKKLESKINKVFSTPIPFSYSKNLDCWVDNEEDIDVILKKSTILNLDINNDIISDISGFNSSVITYPDAQLVPGINGKAIHLVNNESSEVIVHKAMDIEYNDMFNNFTVSFWLRVPKVSASHLEQYGTNEYSIISSMKKHSLSIGSGWSVSLKGNNLIWTLKDSAGEVRQITFRDLPDKFNAYLANKWVFITITNDRLSSANLYINGVLMGSAEITGLGAIREDNNITLKLDRCNNNNQYVSIDKFRIFCKALNPKEIEKLYTSYLSITFLRDFWGNPLRYDTEYYLIPVASSSKDVQLKNITDYMYLTNAPSYTNGKLNIYYRRLYNGLKFIIKRYTPNNEIDSFVKSGDFIKLYVSYNNNEHIVGYPKDGNAFNNLDRILRVGYNAPGIPLYKKMEAVKLRDLKTYSVQLKLYDDKNASLGLVGTHNGQIGNDPNRDILIASNWYFNHLKDKILGCDWYFVPTDEGWTND

SEQ ID NO: 1415 - protein, 124 aa, Artificial Sequence
  gi|772455196|gb|AJW82066.1| cholera toxin B subunit [Vibrio cholerae]
MIKLKFGVFFTVLLSSAYAHGTPQNITDLCAEYHNTQIHTLNDKIFSYTESLAGKREMAIITFKNGATFQVEVPGSQHIDSQKKAIERMKDTLRIAYLTEAKVEKLCVWNNKTPHAIAAISMAN

SEQ ID NO: 1416 - protein, 124 aa, Artificial Sequence
  gi|1648866|emb|CAA58800.1| heat-labile enterotoxin [Escherichia coli]
MNKVKFYVLFTALLSSLCAHGAPQSITELCSEYHNTQIYTINDKILSYTESMAGKREMVIITFKSGATFQVEVPGSQHIDSQKKAIERMKDTLRITYLTETKIDKLCVWNNKTPNSIAAISMEN

SEQ ID NO: 1417 - protein, 44 aa, Artificial Sequence
  gi|930431380|ref|WP_054193159.1| phenol soluble modulin [Staphylococcus aureus]
MEGLFNAIKDTVTAAINNDGAKLRTSIVSIVENGVGLLGKLFGF

SEQ ID NO: 1418 - protein, 144 aa, Artificial Sequence
  gi|344178830|dbj|BAK64090.1| neutrophil-activating protein, partial [Helicobacter pylori]
MKTFEILKHLQADAIVLFMKVHNFHWNVKGTDFFNVHKATEEIYEGFADMFDDLAERIAQLGHHPLVTLSEALKLTRVKEETKTSFHSKDIFKEILEDYKHLEKEFKELSNTAEKEGDKVTVTYADDQLAKLQKSIWMLQAHLA

SEQ ID NO: 1419 - protein, 273 aa, Artificial Sequence
  gi|258154|gb|AAB23810.1| outer surface protein A [Borrelia burgdorferi]
MKKYLLGIGLILALIACKQNVSSLDEKNSVSVDLPGEMKVLVSKEKDKDGKYSLMATVDKLELKGTSDKSNGSGTLEGEKSDKSKAKLTISEDLSKTTFEIFKEDGKTLVSKKVNSKDKSSIEEKFNAKGELSEKTILRANGTRLEYTEIKSDGTGKAKEVLKDFALEGTLAADKTTLKVTEGTVVLSKHIPNSGEITVELNDSNSTQATKKTGKWDSNTSTLTISVNSKKTKNIVFTKEDTITVQKYDSAGTNLEGNAVEIKTLDELKNALK

SEQ ID NO: 1420 - protein, 121 aa, Artificial Sequence
  gi|555220740|ref|WP_023213468.1| pilin [Salmonella enterica]
MNAVLSVQGASAPVQKKSFFSKFTRLNMLRLARAVIPAAVLMMFFPQLAMAAGSSGQDLMASGNTTVKATFGKDSSIVKWVILAEVLVGAVMYMMTKNVKFLAGFAIISVFIAVGMAVVGL

SEQ ID NO: 1421 - protein, 254 aa, Artificial Sequence
  gi|810272951|emb|CNR99905.1| pilin [Neisseria gonorrhoeae]
MPTRLDSRLRGNDEAILLAEGQKSAVTEYYLNHGIWPENNSAAGVASASKIIGKYVKQVEVKNGVVTATMASTGVNKEIQGKKLSLWARREDGSVKWFCGQPVTRNDAADNDDVAKDDAAGNAIETKHLPSTCRDESSLPGIARITANGRKTTTRPAWHPPPSDIKGKYVKSVTVAKGVVTAEMKSDGVNKEIQGKRLSLWAKRQDGSVKWFCGQPVTRTAGANNDAVAAANDKDKEIDTKHLPSTCRDEPTAE

SEQ ID NO: 1422 - protein, 296 aa, Artificial Sequence
  Full length MHC Invariant chain (Ii) (feed into proteasome, degradation)_ HsCD74(wt)
MHRRRSRSCREDQKPVMDDQRDLISNNEQLPMLGRRPGAPESKCSRGALYTGFSILVTLLLAGQATTAYFLYQQQGRLDKLTVTSQNLQLENLRMKLPKPPKPVSKMRMATPLLMQALPMGALPQGPMQNATKYGNMTEDHVMHLLQNADPLKVYPPLKGSFPENLRHLKNTMETIDWKVFESWMHHWLLFEMSRHSLEQKPTDAPPKVLTKCQEEVSHIPAVHPGSFRPKCDENGNYLPLQCYGSIGYCWCVFPNGTEVPNTRSRGHHNCSESLELEDPSSGLGVTKQDLGPVPM

SEQ ID NO: 1423 - protein, 279 aa, Artificial Sequence
  gi|123110|sp|P04441.3|HG2A_MOUSE RecName: Full=H-2 class II histocompatibility antigen gamma chain AltName: Full=Ia antigen-associated invariant chain Short=Ii AltName: Full=MHC class II-associated invariant chain AltName: CD_antigen=CD74
MDDQRDLISNHEQLPILGNRPREPERCSRGALYTGVSVLVALLLAGQATTAYFLYQQQGRLDKLTITSQNLQLESLRMKLPKSAKPVSQMRMATPLLMRPMSMDNMLLGPVKNVTKYGNMTQDHVMHLLTRSGPLEYPQLKGTFPENLKHLKNSMDGVNWKIFESWMKQWLLFEMSKNSLEEKKPTEAPPKVLTKCQEEVSHIPAVYPGAFRPKCDENGNYLPLQCHGSTGYCWCVFPNGTEVPHTKSRGRHNCSEPLDMEDLSSGLGVTRQELGQVTL

SEQ ID NO: 1424 - protein, 30 aa, Artificial Sequence
  Invariant chain (li) lysosome targeting signal (feed into proteasome, degradation)_ HsCD74
MDDQRDLISNNEQLPMLGRRPGAPESKCSR

SEQ ID NO: 1425 - protein, 29 aa, Artificial Sequence
  invariant_chain_sorting_signal_mouse
MDDQRDLISNHEQLPILGNRPREPERCSR

SEQ ID NO: 1426 - protein, 316 aa, Artificial Sequence
  C1C2 Lactadherin domain (attachment to exosomes)_ MmMfge8(148-463)(wt)
CSTQLGMEGGAIADSQISASSVYMGFMGLQRWGPELARLYRTGIVNAWTASNYDSKPWIQVNLLRKMRVSGVMTQGASRAGRAEYLKTFKVAYSLDGRKFEFIQDESGGDKEFLGNLDNNSLKVNMFNPTLEAQYIKLYPVSCHRGCTLRFELLGCELHGCSEPLGLKNNTIPDSQMSASSSYKTWNLRAFGWYPHLGRLDNQGKINAWTAQSNSAKEWLQVDLGTQRQVTGIITQGARDFGHIQYVASYKVAHSDDGVQWTVYEEQGSSKVFQGNLDNNSHKKNIFEKPFMARYVRVLPVSWHNRITLRLELLGC

SEQ ID NO: 1427 - protein, 319 aa, Artificial Sequence
  gi|2506380|sp|Q08431.2|MFGM_HUMAN RecName:Lactadherin_Lactadherin_domain
CVEPLGMENGNIANSQIAASSVRVTFLGLQHWVPELARLNRAGMVNAWTPSSNDDNPWIQVNLLRRMWVTGVVTQGASRLASHEYLKAFKVAYSLNGHEFDFIHDVNKKHKEFVGNWNKNAVHVNLFETPVEAQYVRLYPTSCHTACTLRFELLGCELNGCANPLGLKNNSIPDKQITASSSYKTWGLHLFSWNPSYARLDKQGNFNAWVAGSYGNDQWLQVDLGSSKEVTGIITQGARNFGSVQFVASYKVAYSNDSANWTEYQDPRTGSSKIFPGNWDNHSHKKNLFETPILARYVRILPVAWHNRIALRLELLGCF

SEQ ID NO: 1428 - protein, 406 aa, Artificial Sequence
  gi|126377|sp|P11438.2|LAMP1_MOUSE RecName: Full=Lysosome-associated membrane glycoprotein 1 Short=LAMP-1 Short=Lysosome-associated membrane protein 1 AltName: Full=120 kDa lysosomal membrane glycoprotein AltName: Full=CD107
MAAPGARRPLLLLLLAGLAHGASALFEVKNNGTTCIMASFSASFLTTYETANGSQIVNISLPASAEVLKNGSSCGKENVSDPSLTITFGRGYLLTLNFTKNTTRYSVQHMYFTYNLSDTEHFPNAISKEIYTMDSTTDIKADINKAYRCVSDIRVYMKNVTVVLRDATIQAYLSSGNFSKEETHCTQDGPSPTTGPPSPSPPLVPTNPTVSKYNVTGNNGTCLLASMALQLNITYLKKDNKTVTRAFNISPNDTSSGSCGINLVTLKVENKNRALELQFGMNASSSLFFLQGVRLNMTLPDALVPTFSISNHSLKALQATVGNSYKCNTEEHIFVSKMLSLNVFSVQVQAFKVDSDRFGSVEECVQDGNNMLIPIAVGGALAGLVLIVLIAYLIGRKRSHAGYQTI

SEQ ID NO: 1429 - protein, 11 aa, Artificial Sequence
  sorting-signal_mmLAMP-1
RKRSHAGYQTI

SEQ ID NO: 1430 - protein, 417 aa, Artificial Sequence
  gi|206729915|sp|P11279.3|LAMP1_HUMAN RecName: Full=Lysosome-associated membrane glycoprotein 1 Short=LAMP-1 Short=Lysosome-associated membrane protein 1 AltName: Full=CD107 antigen-like family member A AltName: CD_antigen=CD107a Flags:
MAAPGSARRPLLLLLLLLLLGLMHCASAAMFMVKNGNGTACIMANFSAAFSVNYDTKSGPKNMTFDLPSDATVVLNRSSCGKENTSDPSLVIAFGRGHTLTLNFTRNATRYSVQLMSFVYNLSDTHLFPNASSKEIKTVESITDIRADIDKKYRCVSGTQVHMNNVTVTLHDATIQAYLSNSSFSRGETRCEQDRPSPTTAPPAPPSPSPSPVPKSPSVDKYNVSGTNGTCLLASMGLQLNLTYERKDNTTVTRLLNINPNKTSASGSCGAHLVTLELHSEGTTVLLFQFGMNASSSRFFLQGIQLNTILPDARDPAFKAANGSLRALQATVGNSYKCNAEEHVRVTKAFSVNIFKVWVQAFKVEGGQFGSVEECLLDENSMLIPIAVGGALAGLVLIVLIAYLVGRKRSHAGYQTI

SEQ ID NO: 1431 - protein, 12 aa, Artificial Sequence
  sorting-signal_hsLAMP-1
GRKRSHAGYQTI

SEQ ID NO: 1432 - protein, 478 aa, Artificial Sequence
  gi|2498525|sp|Q14108.2|SCRB2_HUMAN RecName: Full=Lysosome membrane protein 2 AltName: Full=85 kDa lysosomal membrane sialoglycoprotein Short=LGP85 AltName: Full=CD36 antigen-like 2 AltName: Full=Lysosome membrane protein II Short=LIMP II AltName:
MGRCCFYTAGTLSLLLLVTSVTLLVARVFQKAVDQSIEKKIVLRNGTEAFDSWEKPPLPVYTQFYFFNVTNPEEILRGETPRVEEVGPYTYRELRNKANIQFGDNGTTISAVSNKAYVFERDQSVGDPKIDLIRTLNIPVLTVIEWSQVHFLREIIEAMLKAYQQKLFVTHTVDELLWGYKDEILSLIHVFRPDISPYFGLFYEKNGTNDGDYVFLTGEDSYLNFTKIVEWNGKTSLDWWITDKCNMINGTDGDSFHPLITKDEVLYVFPSDFCRSVYITFSDYESVQGLPAFRYKVPAEILANTSDNAGFCIPEGNCLGSGVLNVSICKNGAPIIMSFPHFYQADERFVSAIEGMHPNQEDHETFVDINPLTGIILKAAKRFQINIYVKKLDDFVETGDIRTMVFPVMYLNESVHIDKETASRLKSMINTTLIITNIPYIIMALGVFFGLVFTWLACKGQGSMDEGTADERAPLIRT

SEQ ID NO: 1433 - protein, 478 aa, Artificial Sequence
  gi|50400807|sp|O35114.3|SCRB2_MOUSE RecName: Full=Lysosome membrane protein 2 AltName: Full=85 kDa lysosomal membrane sialoglycoprotein Short=LGP85 AltName: Full=Lysosome membrane protein II Short=LIMP II AltName: Full=Scavenger receptor class B
MGRCCFYTAGTLSLLLLVTSVTLLVARVFQKAVDQTIEKNMVLQNGTKVFNSWEKPPLPVYIQFYFFNVTNPEEILQGEIPLLEEVGPYTYRELRNKANIQFGENGTTISAVTNKAYVFERNQSVGDPNVDLIRTINIPLLTVVDLAQLTLLRELIEAMLKAYQQKLFVIHTVHELLWGYKDEILSLVHIFKPDVSPNFGLFYERNGTNDGEYVFLTGEDNYLNFSKIVEWNGKTSLDWWTTDTCNMINGTDGDSFHPLISKDEVLYLFPSDLCRSVHITFSSFENVEGLPAFRYKVPAEILANTSENAGFCIPEGNCMDSGVLNISICKNGAPIIMSFPHFYQADEKFVSAIKGMHPNKEEHESFVDINPLTGIILRGAKRFQINTYVRKLDDFVETGDIRTMVFPVMYLNESVLIDKETANQLKSVINTTLVVTNIPYIIMALGVFFGLVFTWLACRGQGSMDEGTADERAPLIRT

SEQ ID NO: 1434 - protein, 22 aa, Artificial Sequence
  F2A
VKQTLNFDLLKLAGDVESNPGP

SEQ ID NO: 1435 - protein, 17 aa, Artificial Sequence
  F2A_fragment
NFDLLKLAGDVESNPGP

SEQ ID NO: 1436 - protein, 35 aa, Artificial Sequence
  Avisivirua A
ARRTLEWARREVGAIDETDHKDILLGGDIEENPGP

SEQ ID NO: 1437 - protein, 35 aa, Artificial Sequence
  Duck hepatitis A virus
RLKTLAFELNLEIESDQIRNKKDLTTEGVEPNPGP

SEQ ID NO: 1438 - protein, 35 aa, Artificial Sequence
  Encephalomyocarditis virus
VREENVFGLYRIFNAHYAGYFADLLIHDIETNPGP

SEQ ID NO: 1439 - protein, 35 aa, Artificial Sequence
  Cosavirus A
IMADSVLPRPLTRAERDVARDLLLIAGDIESNPGP

SEQ ID NO: 1440 - protein, 35 aa, Artificial Sequence
  Equine rhinitis B virus 1
SEPIPEATLSTILSEGATNFSLLKLAGDVELNPGP

SEQ ID NO: 1441 - protein, 35 aa, Artificial Sequence
  Seneca Valley virus
RYKNARAWCPSMLPFRSYKQKMLMQSGDIETNPGP

SEQ ID NO: 1442 - protein, 35 aa, Artificial Sequence
  Hunnivirus A
CPRPGMAIDPPAQSSGATNFSLLRLAGDVELNPGP

SEQ ID NO: 1443 - protein, 35 aa, Artificial Sequence
  Mischivirus A
DSYPASGEEEEDDFHDMEDHSDILLGGDVEENPGP

SEQ ID NO: 1444 - protein, 35 aa, Artificial Sequence
  Mosavirus A2
TNSRAKLMVDEDYVIQRSAHRSVLLDGDVESNPGP

SEQ ID NO: 1445 - protein, 35 aa, Artificial Sequence
  Pasivirus A1
DIPSFQRDFINWLGSKEELQNMILQCGDVEQNPGP

SEQ ID NO: 1446 - protein, 35 aa, Artificial Sequence
  Infectious flacherie virus
NYPLVPSIGNVARTLTRAEIEDELIRAGIESNPGP

SEQ ID NO: 1447 - protein, 35 aa, Artificial Sequence
  Cricket paralysis virus
FQQWKLVSSNDECRAFLRKRTQLLMSGDVESNPGP

SEQ ID NO: 1448 - protein, 35 aa, Artificial Sequence
  Human rotavirus C
LKKHNGAGYPLIVANSKFQIDKILISGDIELNPGP

SEQ ID NO: 1449 - protein, 35 aa, Artificial Sequence
  Lymantria dispar cypovirus 1
TDFLSMTAFDFQQAVFRSNYDLLKLCGDVESNPGP

SEQ ID NO: 1450 - protein, 19 aa, Artificial Sequence
  F2A
LLNFDLLKLAGDVESNPGP

SEQ ID NO: 1451 - protein, 22 aa, Artificial Sequence
  F2A
VKQTLNFDLLKLAGDVESNPGP

SEQ ID NO: 1452 - protein, 25 aa, Artificial Sequence
  Linker-F2A
GSGVKQTLNFDLLKLAGDVESNPGP

SEQ ID NO: 1453 - protein, 40 aa, Artificial Sequence
  Linker-FMDV1D-F2A 30aa
MHGRAKRSLEHKQKIVAPVKQTLNFDLLKLAGDVESNPGP

SEQ ID NO: 1454 - protein, 35 aa, Artificial Sequence
  Linker-FMDV1D-F2A 25aa
MHGRAKRSLEVAPVKQTLNFDLLKLAGDVESNPGP

SEQ ID NO: 1455 - protein, 35 aa, Artificial Sequence
  Linker-FMDV1D-F2A 25aa mut
MHGSGSRGACVAPVKQTLNFDLLKLAGDVESNPGP

SEQ ID NO: 1456 - protein, 34 aa, Artificial Sequence
  Linker-FMDV1D-F2A 24aa
MHGRAKRSLEAPVKQTLNFDLLKLAGDVESNPGP

SEQ ID NO: 1457 - protein, 34 aa, Artificial Sequence
  Linker-FMDV1D-F2A 24aa mut
MHGSGSRGACAPVKQTLNFDLLKLAGDVESNPGP

SEQ ID NO: 1458 - protein, 33 aa, Artificial Sequence
  Linker-FMDV1D-F2A 23aa
MHGRAKRSLEPVKQTLNFDLLKLAGDVESNPGP

SEQ ID NO: 1459 - protein, 33 aa, Artificial Sequence
  Linker-FMDV1D-F2A 23aa mut
MHGSGSRGACPVKQTLNFDLLKLAGDVESNPGP

SEQ ID NO: 1460 - protein, 32 aa, Artificial Sequence
  Linker-FMDV1D-F2A 22aa
MHGRAKRSLEVKQTLNFDLLKLAGDVESNPGP

SEQ ID NO: 1461 - protein, 32 aa, Artificial Sequence
  Linker-FMDV1D-F2A 22aa mut
MHGSGSRGACVKQTLNFDLLKLAGDVESNPGP

SEQ ID NO: 1462 - protein, 31 aa, Artificial Sequence
  Linker-FMDV1D-FMDV1D-F2A 21aa
MHGRAKRSLEKQTLNFDLLKLAGDVESNPGP

SEQ ID NO: 1463 - protein, 31 aa, Artificial Sequence
  Linker-FMDV1D-F2A 21aa mut
MHGSGSRGACKQTLNFDLLKLAGDVESNPGP

SEQ ID NO: 1464 - protein, 30 aa, Artificial Sequence
  Linker-FMDV1D-F2A 20aa
MHGRAKRSLEQTLNFDLLKLAGDVESNPGP

SEQ ID NO: 1465 - protein, 30 aa, Artificial Sequence
  Linker-FMDV1D-F2A 20aa mut1
MHGSGSRSLEQTLNFDLLKLAGDVESNPGP

SEQ ID NO: 1466 - protein, 30 aa, Artificial Sequence
  Linker-FMDV1D-F2A 20aa mut2
MHGRAKRGACQTLNFDLLKLAGDVESNPGP

SEQ ID NO: 1467 - protein, 30 aa, Artificial Sequence
  Linker-FMDV1D-F2A 20aa mut3
MHGSGSRGACQTLNFDLLKLAGDVESNPGP

SEQ ID NO: 1468 - protein, 30 aa, Artificial Sequence
  Linker-FMDV1D-F2A 20aa Fmut
MHGAAKASLEQTLNFDLLKLAGDVESNPGP

SEQ ID NO: 1469 - protein, 28 aa, Artificial Sequence
  Linker-F2A 18aa
MHGRAKRSLELNFDLLKLAGDVESNPGP

SEQ ID NO: 1470 - protein, 28 aa, Artificial Sequence
  Linker-F2A 18aa mut
MHGSGSRGACLNFDLLKLAGDVESNPGP

SEQ ID NO: 1471 - protein, 28 aa, Artificial Sequence
  Linker-F2A 18aa Fmut
MHGAAKASLELNFDLLKLAGDVESNPGP

SEQ ID NO: 1472 - protein, 58 aa, Artificial Sequence
  FMDV1D-F2A 58aa
VTELLYRMKRAETYCPRPLLAIHPTEARHKQKIVAPVKQTLNFDLLKLAGDVESNPGP

SEQ ID NO: 1473 - protein, 50 aa, Artificial Sequence
  FMDV1D-F2A 50aa
KRAETYCPRPLLAIHPTEARHKQKIVAPVKQTLNFDLLKLAGDVESNPGP

SEQ ID NO: 1474 - protein, 40 aa, Artificial Sequence
  FMDV1D-F2A 40aa
LLAIHPTEARHKQKIVAPVKQTLNFDLLKLAGDVESNPGP

SEQ ID NO: 1475 - protein, 30 aa, Artificial Sequence
  FMDV1D-F2A 30aa
HKQKIVAPVKQTLNFDLLKLAGDVESNPGP

SEQ ID NO: 1476 - protein, 25 aa, Artificial Sequence
  FMDV1D-F2A 25aa
VAPVKQTLNFDLLKLAGDVESNPGP

SEQ ID NO: 1477 - protein, 24 aa, Artificial Sequence
  FMDV1D-F2A 24aa
APVKQTLNFDLLKLAGDVESNPGP

SEQ ID NO: 1478 - protein, 23 aa, Artificial Sequence
  FMDV1D-F2A 23aa
PVKQTLNFDLLKLAGDVESNPGP

SEQ ID NO: 1479 - protein, 22 aa, Artificial Sequence
  FMDV1D-F2A 22aa
VKQTLNFDLLKLAGDVESNPGP

SEQ ID NO: 1480 - protein, 21 aa, Artificial Sequence
  FMDV1D-F2A 21aa
KQTLNFDLLKLAGDVESNPGP

SEQ ID NO: 1481 - protein, 20 aa, Artificial Sequence
  FMDV1D-F2A 20aa
QTLNFDLLKLAGDVESNPGP

SEQ ID NO: 1482 - protein, 18 aa, Artificial Sequence
  FMDV1D-F2A 18aa
LNFDLLKLAGDVESNPGP

SEQ ID NO: 1483 - protein, 20 aa, Artificial Sequence
  E2A
QCTNYALLKLAGDVESNPGP

SEQ ID NO: 1484 - protein, 23 aa, Artificial Sequence
  Linker-E2A
GSGQCTNYALLKLAGDVESNPGP

SEQ ID NO: 1485 - protein, 19 aa, Artificial Sequence
  P2A
ATNFSLLKQAGDVEENPGP

SEQ ID NO: 1486 - protein, 22 aa, Artificial Sequence
  Linker-P2A
GSGATNFSLLKQAGDVEENPGP

SEQ ID NO: 1487 - protein, 18 aa, Artificial Sequence
  T2A
EGRGSLLTCGDVEENPGP

SEQ ID NO: 1488 - protein, 21 aa, Artificial Sequence
  Linker-T2A
GSGEGRGSLLTCGDVEENPGP

SEQ ID NO: 1489 - protein, 26 aa, Artificial Sequence
  Linker-T2A wt
MHGSRGSGEGRGSLLTCGDVEENPGP

SEQ ID NO: 1490 - protein, 25 aa, Artificial Sequence
  Linker-T2A mut1
MHSRSLEEGRGSLLTCGDVEENPGP

SEQ ID NO: 1491 - protein, 25 aa, Artificial Sequence
  Linker-T2A mut2
RAKRSLEEGRGSLLTCGDVEENPGP

SEQ ID NO: 1492 - protein, 30 aa, Artificial Sequence
  IMNV-2A2
RDVRYIEKPFDKEEHTDILLSGDVESNPGP

SEQ ID NO: 1493 - protein, 30 aa, Artificial Sequence
  IMNV-2A
WDPTYIEISDCMLPPPDLTSCGDVESNPGP

SEQ ID NO: 1494 - protein, 30 aa, Artificial Sequence
  OpbuCPV
IHANDYQMAVFKSNYDLLKLCGDVESNPGP

SEQ ID NO: 1495 - protein, 30 aa, Artificial Sequence
  LdCPV-1
MTAFDFQQAVFRSNYDLLKLCGDVESNPGP

SEQ ID NO: 1496 - protein, 30 aa, Artificial Sequence
  BmCPV-1
RTAFDFQQDVFRSNYDLLKLCGDIESNPGP

SEQ ID NO: 1497 - protein, 30 aa, Artificial Sequence
  PoRV-C
GNGNPLIVANAKFQIDKILISGDVELNPGP

SEQ ID NO: 1498 - protein, 30 aa, Artificial Sequence
  ADRV-N
FFDSVWVYHLANSSWVRDLTRECIESNPGP

SEQ ID NO: 1499 - protein, 30 aa, Artificial Sequence
  CrPV
LVSSNDECRAFLRKRTQLLMSGDVESNPGP

SEQ ID NO: 1500 - protein, 30 aa, Artificial Sequence
  DCV
QGIGKKNPKQEAARQMLLLLSGDVETNPGP

SEQ ID NO: 1501 - protein, 30 aa, Artificial Sequence
  KBV
IGFLNKLYKCGTWESVLNLLAGDIELNPGP

SEQ ID NO: 1502 - protein, 30 aa, Artificial Sequence
  TaV
RGPRPQNLGVRAEGRGSLLTCGDVEENPGP

SEQ ID NO: 1503 - protein, 30 aa, Artificial Sequence
  PrV-2A2
NSDDEEPEYPRGDPIEDLTDDGDIEKNPGP

SEQ ID NO: 1504 - protein, 30 aa, Artificial Sequence
  PrV-2A3
TLMGNIMTLAGSGGRGSLLTAGDVEKNPGP

SEQ ID NO: 1505 - protein, 30 aa, Artificial Sequence
  IFV
PSIGNVARTLTRAEIEDELIRAGIESNPGP

SEQ ID NO: 1506 - protein, 30 aa, Artificial Sequence
  PnPV-2A1
GQRTTEQIVTAQGWVPDLTVDGDVESNPGP

SEQ ID NO: 1507 - protein, 20 aa, Artificial Sequence
  FMDV_A10-61Strain
QLLNFDLLKLAGDVESNLGP

SEQ ID NO: 1508 - protein, 20 aa, Artificial Sequence
  FMDV_O/Ankara
QLLNFDLLKLAGDVEPNPGP

SEQ ID NO: 1509 - protein, 26 aa, Artificial Sequence
  linker
SGGGSGGGGSGGGGSGGGGSGGGSLQ

SEQ ID NO: 1510 - protein, 12 aa, Artificial Sequence
  Rigid-linker_AEAAAKEAAAKA
AEAAAKEAAAKA

SEQ ID NO: 1511 - protein, 46 aa, Artificial Sequence
  Rigid-linker
AEAAAKEAAAKEAAAKEAAAKALEAEAAAKEAAAKEAAAKEAAAKA

SEQ ID NO: 1512 - protein, 5 aa, Artificial Sequence
  Rigid-linker (EAAAK)1
EAAAK

SEQ ID NO: 1513 - protein, 10 aa, Artificial Sequence
  Rigid-linker (EAAAK)2
EAAAKEAAAK

SEQ ID NO: 1514 - protein, 15 aa, Artificial Sequence
  Rigid-linker (EAAAK)3
EAAAKEAAAKEAAAK

SEQ ID NO: 1515 - protein, 4 aa, Artificial Sequence
  Linker-GGG(GC)
GGGG

SEQ ID NO: 1516 - protein, 5 aa, Artificial Sequence
  Linker-GGGGG(GC)
GGGGG

SEQ ID NO: 1517 - protein, 6 aa, Artificial Sequence
  Gly-linker (G)6
GGGGGG

SEQ ID NO: 1518 - protein, 8 aa, Artificial Sequence
  Gly-linker (G)8
GGGGGGGG

SEQ ID NO: 1519 - protein, 5 aa, Artificial Sequence
  Linker GGGS
GGGGS

SEQ ID NO: 1520 - protein, 6 aa, Artificial Sequence
  Linker-G4SG
GGGGSG

SEQ ID NO: 1521 - protein, 9 aa, Artificial Sequence
  Linker-G4SG4(GC)
GGGGSGGGG

SEQ ID NO: 1522 - protein, 10 aa, Artificial Sequence
  Linker-(G4S)2
GGGGSGGGGS

SEQ ID NO: 1523 - protein, 10 aa, Artificial Sequence
  Linker (GGGGS)2
GGGGSGGGGS

SEQ ID NO: 1524 - protein, 15 aa, Artificial Sequence
  Linker-(GGGGS)3
GGGGSGGGGSGGGGS

SEQ ID NO: 1525 - protein, 20 aa, Artificial Sequence
  Linker (GGGGS)4
GGGGSGGGGSGGGGSGGGGS

SEQ ID NO: 1526 - protein, 16 aa, Artificial Sequence
  Linker-GGGSGGGGSGGGGSGG(GC)
GGGSGGGGSGGGGSGG

SEQ ID NO: 1527 - protein, 15 aa, Artificial Sequence
  Linker-GGSGGGGSGGGGSGG
GGSGGGGSGGGGSGG

SEQ ID NO: 1528 - protein, 4 aa, Artificial Sequence
  Linker-GSG
GSGS

SEQ ID NO: 1529 - protein, 21 aa, Artificial Sequence
  Linker(GC)
GSGGGGSAWSHPQFEKGGGGS

SEQ ID NO: 1530 - protein, 5 aa, Artificial Sequence
  Rigid-linker
PAPAP

SEQ ID NO: 1531 - protein, 11 aa, Artificial Sequence
  Linker-PPPGSRHDKIH(GC)
PPPGSRHDKIH

SEQ ID NO: 1532 - protein, 4 aa, Artificial Sequence
  Linker-SGG(GC)
SGGG

SEQ ID NO: 1533 - protein, 4 aa, Artificial Sequence
  Linker-SGS
GSGS

SEQ ID NO: 1534 - protein, 17 aa, Artificial Sequence
  Cleavable-1
VSQTSKLTRAETVFPDV

SEQ ID NO: 1535 - protein, 6 aa, Artificial Sequence
  Cleavable-2
PLGLWA

SEQ ID NO: 1536 - protein, 6 aa, Artificial Sequence
  Cleavable-3
RVLAEA

SEQ ID NO: 1537 - protein, 10 aa, Artificial Sequence
  Cleavable-4
EDVVCCSMSY

SEQ ID NO: 1538 - protein, 8 aa, Artificial Sequence
  Cleavable-5
GGIEGRGS

SEQ ID NO: 1539 - protein, 10 aa, Artificial Sequence
  Cleavable-6
TRHRQPRGWE

SEQ ID NO: 1540 - protein, 10 aa, Artificial Sequence
  Cleavable-7
AGNRVRRSVG

SEQ ID NO: 1541 - protein, 9 aa, Artificial Sequence
  Cleavable-8
RRRRRRRRR

SEQ ID NO: 1542 - protein, 4 aa, Artificial Sequence
  Cleavable-9
GFLG

SEQ ID NO: 1543 - protein, 8 aa, Artificial Sequence
  furin-1
LLRRRRAV

SEQ ID NO: 1544 - protein, 8 aa, Artificial Sequence
  furin-2
AHRLKRDV

SEQ ID NO: 1545 - protein, 9 aa, Artificial Sequence
  furin-3
PRRMKREDL

SEQ ID NO: 1546 - protein, 8 aa, Artificial Sequence
  furin-4
KKRPRRMK

SEQ ID NO: 1547 - protein, 8 aa, Artificial Sequence
  furin-5
SIRKKRFV

SEQ ID NO: 1548 - protein, 8 aa, Artificial Sequence
  furin-6
PRRAKRFA

SEQ ID NO: 1549 - protein, 8 aa, Artificial Sequence
  furin-7
SPRPRRAK

SEQ ID NO: 1550 - protein, 8 aa, Artificial Sequence
  furin-8
FKRTRRSI

SEQ ID NO: 1551 - protein, 8 aa, Artificial Sequence
  furin-9
HIIYRRSA

SEQ ID NO: 1552 - protein, 8 aa, Artificial Sequence
  furin-10
HRRTKRFL

SEQ ID NO: 1553 - protein, 8 aa, Artificial Sequence
  furin-11
GLRLPRET

SEQ ID NO: 1554 - protein, 8 aa, Artificial Sequence
  furin-12
RSRSRRAA

SEQ ID NO: 1555 - protein, 8 aa, Artificial Sequence
  furin-13
ASRTRRNI

SEQ ID NO: 1556 - protein, 8 aa, Artificial Sequence
  furin-14
KLRTVREA

SEQ ID NO: 1557 - protein, 8 aa, Artificial Sequence
  furin-15
KIRIAREA

SEQ ID NO: 1558 - protein, 8 aa, Artificial Sequence
  furin-16
PKRVRRQI

SEQ ID NO: 1559 - protein, 8 aa, Artificial Sequence
  furin-17
MRRKKRFA

SEQ ID NO: 1560 - protein, 9 aa, Artificial Sequence
  furin-18
IKGIQKREA

SEQ ID NO: 1561 - protein, 8 aa, Artificial Sequence
  furin-19
PLRLRRAV

SEQ ID NO: 1562 - protein, 8 aa, Artificial Sequence
  furin-20
GTRFHRQA

SEQ ID NO: 1563 - protein, 8 aa, Artificial Sequence
  furin-21
QSRTRRSS

SEQ ID NO: 1564 - protein, 8 aa, Artificial Sequence
  furin-22
RRRSTRDL

SEQ ID NO: 1565 - protein, 8 aa, Artificial Sequence
  furin-23
GGRQRREL

SEQ ID NO: 1566 - DNA, 199 bp, Artificial Sequence
  Acute bee paralysis virus
cacaacatggttacccatagattgaggaaatttccaataaactcagtattaaggcttgttgtgttggacaaggtgccctatttagggtgaggagccttactggcagccccagtgaatcctccattggataggaacagctatattgggtagttgtagcagttgtattcaaatgaatgcagcgttccgaaatatcatacct

SEQ ID NO: 1567 - DNA, 494 bp, Artificial Sequence
  Avian encephalomyelitis virus
tttgaaagaggcctccggagtgtccggaggctctctttcgacccaacccatactggggggtgtgtgggaccgtacctggagtgcacggtatatatgcattcccgcatggcaagggcgtgctaccttgccccttgacgcatggtatgcgtcatcatttgccttggttaagccccatagaaacgaggcgtcacgtgccgaaaatccctttgcgtttcacagaaccatcctaaccatgggtgtagtatgggaatcgtgtatggggatgattaggatctctcgtagagggataggtgtgccattcaaatccagggagtactctggctctgacattgggacatttgatgtaaccggacctggttcagtatccgggttgtcctgtattgttacggtgtatccgtcttggcacactgaaagggtatttttgggtaatcctttcctactgcctgatagggtggcgtgcccggccacgagagattaagggtagcaatttaaac

SEQ ID NO: 1568 - DNA, 184 bp, Artificial Sequence
  Aphid lethal paralysis virus
aattactaatttgatctttaggttataatgttaggactataaaaattagcttaatgcatttagtaatttaaggcttagttatttaactttacttatcaagatggccgttggcagccccacgaaatctagattagtccgaatgtcctattttgattaggtggtcagataggtcagaaactcacct

SEQ ID NO: 1569 - DNA, 190 bp, Artificial Sequence
  Black queen cell virus nonstructural polyprotein (orf1) and structural polyprotein (orf2) genes
ccaacaatgtgatcttgcttgcggaggcaaaatttgcacagtataaaatctgcaagtagtgctattgttggaatcaccgtacctatttaggtttacgctccaagatcggtggatagcagccctatcaatatctaggagaactgtgctatgtttagaagattaggtagtctctaaacagaacaatttacct

SEQ ID NO: 1570 - DNA, 385 bp, Artificial Sequence
  Bovine viral diarrhea virus 1
gtatacgagaattagaaaaggcactcgtatacgtattgggcaattaaaaataataattaggcctagggaacaaatccctctcagcgaaggccgaaaagaggctagccatgcccttagtaggactagcataatgaggggggtagcaacagtggtgagttcgttggatggcttaagccctgagtacagggtagtcgtcagtggttcgacgccttggaataaaggtctcgagatgccacgtggacgagggcatgcccaaagcacatcttaacctgagcgggggtcgcccaggtaaaagcagttttaaccgactgttacgaatacagcctgatagggtgctgcagaggcccactgtattgctactaaaaatctctgctgtacatggcac

SEQ ID NO: 1571 - DNA, 707 bp, Artificial Sequence
  Cricket paralysis virus (Dicistroviridae) nonstructural polyprotein and structural polyprotein genes
tttaataagtgttgtgcagattaatctgcacagcactagccacaaagttcagtggtcccaattatgggatataaaactcaatggtcgacggagtgacctggaaatgctccccgtgagaaaccttgtttaaacgcacttggaccttctccggcctcagcgccaggcatagctggatcgtcaatcccaagtttggacttagacttgctctatgttacaattgggaggagcgtgacttaccattggtcgttgatgacgttaattccaaacaaaaacaacaacaacaacttagtttaaataattccggtctttaagcatcagggtagaccgatgaggaataaagaaccctataagactgattcgataccaagagctggtgtctgagggattacgactcgcgtggtcggacagcacatgttagtcatgtattatggtgtttcccaacacgtatctttgctctagtattgaactttagtgatgagtgtacttggcatgtacacctgattagttagcccttgtggatacgccactgccgctcaggtacagtaggacataccccaaatattgggttccactcgtagagaagaaaattagtggcgaaacgtacggtttatgtcaaaggagaaggtgattttaattgcacctgaagcaaccctaggtcttccctttgatgtgagctaataaggagtaaccgattcttacaatgtgat

SEQ ID NO: 1572 - DNA, 146 bp, Artificial Sequence
  Crucifer tobamovirus
gaattcgtcgattcggttgcagcatttaaagcggttgacaactttaaaagaaggaaaaagaaggttgaagaaaagggtgtagtaagtaagtataagtacagaccggagaagtacgccggtcctgattcgtttaatttgaaagaaga

SEQ ID NO: 1573 - DNA, 148 bp, Artificial Sequence
  Monocistronic crTMV
gaattcgtcgattcggttgcagcatttaaagcggttgacaactttaaaagaaggaaaaagaaggttgaagaaaagggtgtagtaagtaagtataagtacagaccggagaagtacgccggtcctgattcgtttaatttgaaagaagaaa

SEQ ID NO: 1574 - DNA, 148 bp, Artificial Sequence; identical to SEQ ID NO: 1573
  Bicistronic, uncapped subgenomic I2 RNA (sgRNA) of crTMV

SEQ ID NO: 1575 - DNA, 373 bp, Artificial Sequence
  Hog cholera virus (Classical swine fever virus) 'Chinese' strain
gtatacgaggttagttcattctcgtatacacgattggacaaatcaaaattataatttggttcagggcctccctccagcgacggccgaactgggctagccatgcccatagtaggactagcaaaacggagggactagccatagtggcgagctccctgggtggtctaagtcctgagtacaggacagtcgtcagtagttcgacgtgagcagaagcccacctcgagatgctacgtggacgagggcatgccaagacacaccttaaccctagcgggggtcgctagggtgaaatcacaccacgtgatgggagtacgacctgatagggcgctgcagaggcccactattaggctagtataaaaatctctgctgtacatggcac

SEQ ID NO: 1576 - DNA, 750 bp, Artificial Sequence
  Human coxsackievirus B3 strain 20
ttaaaacagcctgtgggttgatcccacccacagggcccattgggcgctagcactctggtatcacggtacctttgtgcgcctgttttataccccctcccccaactgtaacttagaagtaacacacaccgatcaacagtcagcgtggcacaccagccacgttttgatcaagcacttctgttaccccggactgagtatcaatagactgctcacgcggttgaaggagaaagcgttcgttatccggccaactacttcgaaaaacctagtaacaccgtggaagttgcagagtgtttcgctcagcactaccccagtgtagatcaggtcgatgagtcaccgcattccccacgggcgaccgtggcggtggctgcgttggcggcctgcccatggggaaacccatgggacgctctaatacagacatggtgcgaagagtctattgagctagttggtagtcctccggcccctgaatgcggctaatcctaactgcggagcacacaccctcaagccagagggcagtgtgtcgtaacgggcaactctgcagcggaaccgactactttgggtgtccgtgtttcattttattcctatactggctgcttatggtgacaattgagagattgttaccatatagctattggattggccatccggtgaccaatagagctattatatatctctttgttgggtttataccacttagcttgaaagaggttaaaacattacaattcattgttaagttgaatacagcaaaatgggagc

SEQ ID NO: 1577 - DNA, 189 bp, Artificial Sequence
  Drosophila C virus strain EB
gttaagatgtgatcttgcttccttatacaattttgagaggttaataagaaggaagtagtgctatcttaataattaggttaactatttagttttactgttcaggatgcctattggcagccccataatatccaggacaccctctctgcttcttatatgattaggttgtcatttagaataagaaaataacct

SEQ ID NO: 1578 - DNA, 576 bp, Artificial Sequence
  Encephalomyocarditis virus
ccccccctctccctcccccccccctaacgttactggccgaagccgcttggaataaggccggtgtgcgtttgtctatatgttattttccaccatattgccgtcttttggcaatgtgagggcccggaaacctggccctgtcttcttgacgagcattcctaggggtctttcccctctcgccaaaggaatgcaaggtctgttgaatgtcgtgaaggaagcagttcctctggaagcttcttgaagacaaacaacgtctgtagcgaccctttgcaggcagcggaaccccccacctggcgacaggtgcctctgcggccaaaagccacgtgtataagatacacctgcaaaggcggcacaaccccagtgccacgttgtgagttggatagttgtggaaagagtcaaatggctctcctcaagcgtattcaacaaggggctgaaggatgcccagaaggtaccccattgtatgggatctgatctggggcctcggtgcacatgctttacatgtgtttagtcgaggttaaaaaacgtctaggccccccgaaccacggggacgtggttttcctttgaaaaacacgatgataa

SEQ ID NO: 1579 - DNA, 390 bp, Artificial Sequence
  Ectropis obliqua picorna-like virus
cttttcagcaacggcggtattgagtaatctcttaagattatttaatacgtgttcttacatttaaattcaaatagttaagatttaattaggattaattaccgatattgtaatcttctattattttatcggtttgaatctcccttacacatatgattatgtagcgtgcttattagtagtagatacatctaaattctacaacgacctaataagttttgattatataagataggatgtgaaggctccgatttgtgaataggtttttatattcgaagtaggtagtattgcgcatactattaattccacaatacgtggtcttcgtcttagcaaatttacctttcgtccctatggaaatggctcttcggacctgagtacagtgggacaaccccaacg

SEQ ID NO: 1580 - DNA, 712 bp, Artificial Sequence
  Equine rhinitis A virus
gagaggagcccgttttcgggcacttgtctcctaaacaatgttggcgcgcatttgcgcgccccccccctttttcagccccctgtcattgactggtcgaagcgttcgcaataagactggtcgtcacttggctgttctatcgtttcaggctttagcgcgcccttgcgcggcgggccgtcaagcccgtgcgctgtatagcgccaggtaaccggacagcggcgtgctggattttcccggtgccattgctctggatggtgtcaccaagctgacaaatgcggagtgaacctcacaaagcgacacgcctgtggtagcgctgcccaaaagggagcggaactccccgccgaggcggtcctctctggccaaaagcccagcgttgatagcgccttttgggatgcaggaaccccacctgccaggtgtgaagtggagtgagcggatctccaatttggtctgttctgaactacaccatttactgctgtgaagaatgccctggaggcaagctggttacagccctgaccaggccctgcccgtgactctcgaccggcgcagggtcaaaaattgtctaagcagcagcaggaacgcgggagcgtttcttttccttttgtactgacatgatggcggcgtctaaggtgtatagagtttgcgagcagactctgctggcaggtgccgttcgcatgatggacaaattcttgcaaaagagaactgtttttgtccccca

SEQ ID NO: 1581 - DNA, 759 bp, Artificial Sequence
  Equine Rhinovirus type 2
attgcttttcttccaactaaacccctattgatgtgttggtcgtttgccaatcggagggcgacaggcacaggtcgctccgagttctagtagtgtgggaacttgttactactgatgaaacgaggtagtgacactcagtacctgcgaacgaggtcggggccctcccttcttccttcacccaactttcacttttcgttccactttagcaggggtcttctttctatccccctggcggcattggaactagccgtcgcgtcttaacgcgcagccctgaaggccccacaccttgtggatcttgccgtgggtatgtttctggcatgtgtttctcaagcctgcaaccgaagccgaacagccacatgaacagtttgagcgtggtagcgctgtgtgagttggcggtggatccccctcgtggtaacacgagcccccgtggccaaaagcccagtgtttacagcacctctcacatccaggacgaccccatcctggcgctcactcttagtagtatggcttagtacgcattaggtggtaagccgagctctccctcggccttgttctgaatgcacacatgtctaggggctaaggatgtcctacaggtacccgcacgtaaccttcagagagtgcggatctgagtaggagaccgtggtgcactgctttacagatgcagcccggtttaaaaagcgtctatgcccctacagggtagcggtgggccgcgccctttccttttaaaactacttgttctatggtgacaatggcaggaaacatgat

SEQ ID NO: 1582 - DNA, 748 bp, Artificial Sequence
  Human enterovirus 71 strain pinf7-54A from Taiwan
ttaaaacagcctgtgggttgcacccacccacagggcccactgggcgctagcactctggtactgaggtacctttgtgcgcctgtttttactccccttcccccgaagtaacttagaagctgtaaatcaacgatcaatagcaggtgtggcacaccagtcataccttgatcaagcacttctgtttccccggactgagtatcaataggctgctcgcgcggctgaaggagaaaacgttcgttacccgaccaactacttcgagaagcttagtaccaccatgaacgaggcagggtgtttcgctcagcacaaccccagtgtagatcaggctgatgagtcactgcaacccccatgggcgaccatggcagtggctgcgttggcggcctgcccatggagaaatccatgggacgctctaattctgacatggtgtgaagagcctattgagctagctggtagtcctccggcccctgaatgcggctaatcctaactgcggagcacatgctcacaaaccagtgggtggtgtgtcgtaacgggcaactctgcagcggaaccgactactttgggtgtccgtgtttccttttattcctatattggctgcttatggtgacaatcaaaaagttgttaccatatagctattggattggccatccggtgtgcaacagggcaattgtttacctatttattggttttgtaccattatcactgaagtctgtgatcactctcaaattcattttgaccctcaacacaatcaaacatg

SEQ ID NO: 1583 - DNA, 235 bp, Artificial Sequence
  FeLV-Notch2
ctctaaggtgtttctggaaattgacaaccgccagtgtgttcaagattcagaccagtgtttcaagaacacggatgcagcagcagctcttctggcctctcacgccatccaggggaccttgtcctaccctcttgtgtccgtcgtcagtgaatctctgactcgaaaaggtactcagcttctctatctacttgctgttgccgttgtcattatcctgtttattatcttgctgggagttatc

SEQ ID NO: 1584 - DNA, 461 bp, Artificial Sequence
  Foot-and-mouth disease virus (FMDV) strain C, isolate c-s8c1
agcaggtttccccaactgacacaaaacgtgcaacttgaaactccgcctggtctttccaggtctagaggggtaacactttgtactgtgtttggctccacgctcgatccactggcgagtgttagtaacagcactgttgcttcgtagcggagcatgacggccgtgggaactcctccttggtaacaaggacccacggggccaaaagccacgcccacacgggcccgtcatgtgtgcaaccccagcacggcgactttactgcgaaacccactttaaagtgacattgaaactggtacccacacactggtgacaggctaaggatgcccttcaggtaccccgaggtaacacgcgacactcgggatctgagaaggggactggggcttctataaaagcgctcggtttaaaaagcttctatgcctgaataggtgaccggaggtcggcacctttcctttacaattaatgaccct

SEQ ID NO: 1585 - DNA, 693 bp, Artificial Sequence
  Hepatitis GB virus A polyprotein
gccccggacctcccaccgaggtggggggaaaggggccctggaccggccgggtggaaggcccggaaccggtccatcttcctcaaggttgaggaaggggtacgtctatcggtccggtcggtccgaaaggcgtctggatgcctagtgttagggttcgtaggtggtaaatcccagctaggcgtgaaagcgctataggataggcttatcccggtgaccgctgccccggaaccagccccgcggttctttggacacggtccacaggttgggggtaccggtgtgaataaccccccgactgaagcgtcagtcgttaaacggagacggtctcctgagatcgcaacgacgccccacgtacgggaacgccgccaaaaccttcgggacagctatgcgggttgacaatcccagtggggggccggggaccagctgattacttgtcctgcgagttcctcttgagactggccgaaaggcagccacggggccaccaaggcggcgcagcgctgcatgcggcaaggggaaaaatccttcgggtgacccctggtggcaatcccttcccttaggagcatgagtgtggtcgacacattcaccatggcttggctgtggttgctggtttgcttccccctcgcggggggggtgctcttcaactcgcggcaccagtgcttcaatggggaccattatgtgctttccaattgttgttcccga

SEQ ID NO: 1586 - DNA, 416 bp, Artificial Sequence
  Hepatitis GB virus B genomic RNA.
gctaggaatgctcctggagcaccccccctagcagggcgtgggggatttcccctgcccgtctgcagaagggtggagccaaccaccttagtatgtaggcggcgggactcatgacgctcgcgtgatgacaagcgccaagcttgacttggatggccctgatgggcgttcatgggttcggtggtggtggcgctttaggcagcctccacgcccaccacctcccagatagagcggcggcactgtagggaagaccggggaccggtcactaccaaggacgcagacctctttttgagtatcacgcctccggaagtagttgggcaagcccacctatatgtgttgggatggttggggttagccatccataccgtactgcctgatagggtccttgcgaggggatctgggagtctcgtagaccgtagcac

SEQ ID NO: 1587 - DNA, 630 bp, Artificial Sequence
  GBV-C
cactgggtgcaagccccagaaaccgacgcctactgaagtagacgtaatggccccggcccgaaccggcgaccggccaaaaggtggtggatgggtgatgacagggttggtaggtcgtaaatcccggtcatcctggtagccactataggtgggtcttaaggggaggctacggtccctcttgcgcatatggaggaaaagcgcacggtccacaggtgttggtcctaccggtgtaataaggacccggcgctaggcacgccgttaaaccgagcccgttactcccctgggcaaacgacgcccacgtacggtccacgtcgcccttcaatgtctctcttgaccaataggcgtagccggcgagttgacaaggaccagtgggggccgggcgggagggggaaggacccccaccgctgcccttcccggggaggcgggaaatgcatggggccacccagctccgcggcggcctacagccggggtagcccaagaaccttcgggtgagggcgggtggcattttcttttcctataccgatcatggcagtccttctgctcctactcgtggtggaggccggggctattttagccccggccacccatgcttgtagcgcgaaagggcaatatttcctcacaaactgttgcgcc

SEQ ID NO: 1588 - DNA, 517 bp, Artificial Sequence
  Drosophila melanogaster gypsy LTR-transposable element
tgtaagttttacaagacacttctttgacgcaatcaagaaatttacgagtgaaaaaaaaaaaaaaaaaaagttgtgtatctggccacgtaataagtgtgcgttgaatttattcgcaaaaacattgcatattttcggcaaagtaaaattttgttgcataccttatcaaaaaataagtgctgcatactttttagagaaaccaaataattttttattgcatacccgtttttaataaaatacattgcataccctcttttaataaaaaatattgcatactttgacgaaacaaattttcgttgcatacccaataaaagattattatattgcatacccgtttttaataaaatacattgcataccctcttttaataaaaaatattgcatacgttgacgaaacaaattttcgttgcatacccaataaaagattattatattgcataccttttcttgccataccatttagccgatcaattgtgctcggcaacagtatatttgtggtgtgccaaccaacaaccaatgag

SEQ ID NO: 1589 - DNA, 583 bp, Artificial Sequence
  HAV
taattcctgcaggttcagggttcttaaatctgtttctctataagaacactcatttttcacgctttctgtcttctttcttccagggctctccccttgccctaggctctggccgttgcgcccggcggggtcaactccatgattagcatggagctgtaggagtctaaattggggacacagatgtttggaacgtcaccttgcagtgttaacttggctttcatgaatctctttgatcttccacaaggggtaggctacgggtgaaacctcttaggctaatacttctatgaagagatgccttggatagggtaacagcggcggatattggtgagttgttaagacaaaaaccattcaacgccggaggactgactctcatccagtggatgcattgagtggattgactgtcagggctgtctttaggcttaattccagacctctctgtgcttagggcaaacatcatttggccttaaatgggattctgtgagaggggatccctccattgacagctggactgttctttggggccttatgtggtgtttgcctctgaggtactcaggggcatttaggtttttcctcattcttaaataat

SEQ ID NO: 1590 - DNA, 383 bp, Artificial Sequence
  Hepatitis C virus subtype 1a, strain H
gccagccccctgatgggggcgacactccaccatgaatcactcccctgtgaggaactactgtcttcacgcagaaagcgtctagccatggcgttagtatgagtgtcgtgcagcctccaggaccccccctcccgggagagccatagtggtctgcggaaccggtgagtacaccggaattgccaggacgaccgggtcctttcttggataaacccgctcaatgcctggagatttgggcgtgcccccgcaagactgctagccgagtagtgttgggtcgcgaaaggccttgtggtactgcctgatagggtgcttgcgagtgccccgggaggtctcgtagaccgtgcaccatgagcacgaatcctaaacctcaaagaaaaaccaaacgtaac

SEQ ID NO: 1591 - DNA, 188 bp, Artificial Sequence
  Himetobi P virus
gaaaatgtgtgatctgattagaagtaagaaaattcctagttataatatttttaatactgctacatttttaagacccttagttatttagctttaccgcccaggatggggtgcagcgttcctgcaatatccagggcacctaggtgcagccttgtagttttagtggactttaggctaaagaatttcactag

SEQ ID NO: 1592 - DNA, 233 bp, Artificial Sequence
  human immunodeficiency virus 1
gtgtgcccgtctgttgtgtgactctggtaactagagatccctcagacccttttagtcagtgtggaaaatctctagcagtggcgcccgaacagggacctgaaagcgaaagggaaaccagaggagctctctcgacgcaggactcggcttgctgaagcgcgcacggcaagaggcgaggggcggcgactggtgagtacgccaaaaattttgactagcggaggctagaaggagagaga

SEQ ID NO: 1593 - DNA, 188 bp, Artificial Sequence
  Homalodisca coagulata virus-1
gactaagtgtgaacttgcctctctcaacaaaaagccaccgacattaagagagagagtattgctgcttagttaactgcaggccctatttagggttaccgcccaggatctgcaacagcattcctgtatcatccagggcaccggtggacttggtgaggattgagttgacctcatcattagagaccagactc

SEQ ID NO: 1594 - DNA, 604 bp, Artificial Sequence
  Human rhinovirus (HRV)
atccaggttgttcccacctggatttcccacagggagtggtactctgttattacggtaactttgtacgccagttttatctcccttcccccatgtaacttagaagtttttcacaaagaccaatagccggtaatcagccagattactgaaggtcaagcacttctgtttccccggtcaatgttgatatgctccaacagggcaaaaacaactgcgatcgttaaccgcaaagcgcctacgcaaagcttagtagcatctttgaaatcgtttggctggtcgatccgccatttcccctggtagacctggcagatgaggctagaaataccccactggcgacagtgttctagcctgcgtggctgcctgcacaccctatgggtgtgaagccaaacaatggacaaggtgtgaagagccccgtgtgctcgctttgagtcctccggcccctgaatgtggctaaccttaaccctgcagctagagcacgtaacccaatgtgtatctagtcgtaatgagcaattgcgggatgggaccaactactttgggtgtccgtgtttcactttttcctttatatttgcttatggtgacaatatatacaatatatatattggcaccatgg

SEQ ID NO: 1595 - DNA, 199 bp, Artificial Sequence
  Israel acute paralysis virus of bees
cattctatggttacccatcattagaggaaatttccaataaactctggtgtaaggcttagagtgatggtcgaggtgccctatttagggtgaggagcctcggtggcagccccaccaaatcctctattggataggaacagctgtactgggcagttacagcagtcgtatggtaacacatgcggcgttccgaaataccatgcct

SEQ ID NO: 1596 - DNA, 521 bp, Artificial Sequence
  Drosophila melanogaster Idefix retroelement
ttcggtgttcttctcaaataaaaagattgtaatcatttagtgaaataaaaattatatttttttcacttataaatattgcaagtatttaattggcgcagtcggttaggatccaataaaataaaagagtccttttagtacggtactgatcaactgaaggatatgctatacgactagctatccaagatcagcgaattaaaatagtgattcaaaaatattttttaatccgcaaaagaatctacgtgaaagtagtattcaaaataaaatcccgtgcggtcggaaacaaaaattaatttaaattttttaattccgaaacttaaaaccaagtttaaagaaaacttaaaatcaagaaaacttaaaaccaagtttaaagaaaacttaaaatcaagaaaacttaaaaccaagtttaaagaaaacttaaaatcaagaaaacttaaaaccaagtttaaagaaaactcaaaatcaagaaaacttaaagccaaaataagctagaaaactaaaagacatcatggcagtcccacaac

SEQ ID NO: 1597 - DNA, 202 bp, Artificial Sequence
  Kashmir bee virus
cactgtttcatggttacccatcatttgaggaaatttccaataaacttgaatgtaaggcttgaaacagtggtctaggtgccctatttagggtgaggagcctagctggcagccccagtgaatcctctattggatagaaaccgctatatcgggtagctatagcagtcggatagtaatatatccggcgtttcgaaataccatacct

SEQ ID NO: 1598 - DNA, 101 bp, Artificial Sequence
  Mouse L1 inserted into the Mus musculus glycine receptor beta-subunit gene
agaatctgtctcccaggtctgctgatagacggtaacagaatcaccagaagaacaatctctaaacagagtcaactataactactaactccagagattaccag

SEQ ID NO: 1599 - DNA, 188 bp, Artificial Sequence
  Plautia stali intestine virus (Dicistroviridae)
gactatgtgatcttattaaaattaggttaaatttcgaggttaaaaatagttttaatattgctatagtcttagaggtcttgtatatttatacttaccacacaagatggaccggagcagccctccaatatctagtgtaccctcgtgctcgctcaaacattaagtggtgttgtgcgaaaagaatctcactt

SEQ ID NO: 1600 - DNA, 312 bp, Artificial Sequence
  Human poliovirus 1 Mahoney
atgagtctggacatccctcaccggtgacggtggtccaggctgcgttggcggcctacctatggctaacgccatgggacgctagttgtgaacaaggtgtgaagagcctattgagctacataagaatcctccggcccctgaatgcggctaatcccaacctcggagcaggtggtcacaaaccagtgattggcctgtcgtaacgcgcaagtccgtggcggaaccgactactttgggtgtccgtgtttccttttattttattgtggctgcttatggtgacaatcacagattgttatcataaagcgaattggattggcc

SEQ ID NO: 1601 - DNA, 742 bp, Artificial Sequence
  Poliovirus P3/Leon/37 (type 3)
ttaaaacagctctggggttgttcccaccccagaggcccacgtggcggctagtacactggtatcacggtacctttgtacgcctgttttatactccctcccccgcaacttagaagcatacaattcaagctcaataggagggggtgcaagccagcgcctccgtgggcaagcactactgtttccccggtgaggccgcatagactgttcccacggttgaaagtggccgatccgttatccgctcatgtacttcgagaagcctagtatcgctctggaatcttcgacgcgttgcgctcagcactcaaccccggagtgtagcttgggccgatgagtctggacagtccccactggcgacagtggtccaggctgcgctggcggcccacctgtggcccaaagccacgggacgctagttgtgaacagggtgtgaagagcctattgagctacatgagagtcctccggcccctgaatgcggctaatcctaaccatggagcaggcagctgcaacccagcagccagcctgtcgtaacgcgcaagtccgtggcggaaccgactactttgggtgtccgtgtttccttttattcttgaatggctgcttatggtgacaatcatagattgttatcataaagcgagttggattggccatccagtgtgaatcagattaattactcccttgtttgttggatccactcccgaaacgttttactccttaacttattgaaattgtttgaagacaggatttcagtgtcaca

SEQ ID NO: 1602 - DNA, 577 bp, Artificial Sequence
  Reticuloendotheliosis virus strain APC-566
ggggtcgccgtcctacacattgttgtgacgtgcggcccagattcgaatctgtaataaaagctttttcttctatatcctcagattggcagtgagaggagattttgttcgtggtgttggctggcctactgggtggggtagggatccggactgaatccgtagtatttcggtacaacatttgggggctcgtccgggattcctccccatcggcagaggtgcctactgtttcttcgaactccggcgccggtaagtaagtacttgattttggtacctcgcgagggtttgggaggatcggagtggcgggacgctgccgggaagctccacctccgctcagcaggggacgccctggtctgagctctgtggtatctgattgttgttgaaccgtctctaagacggtgatactataagtcgtggtttgtgtgtttgtttgttaccttgtgtttgttcgtcacttgtcgacagcgccctgcgaattggtgtacccacaccgcgcggcttgcgaataatactttggagagtcttttgcctccagtgtcttccgtttgtactcgtcctcctctccctctccggccgggatggg

SEQ ID NO: 1603 - DNA, 232 bp, Artificial Sequence
  Rhopalosiphum padi virus
aaattagtggcaataacatatatatgtcaaccctgctcattggtttaattgagcgcatttagtgttgtgtgatcttgcgcgataaatgctgacgtgaaaacgttgcgtattgctacaacacttggttagctatttagctttactaatcaagacgccgtcgtgcagcccacaaaagtctagatacgtcacaggagagcatacgctaggtcgcgttgactatccttatatatga

SEQ ID NO: 1604 - DNA, 200 bp, Artificial Sequence
  Solenopsis invicta virus 1
tttctcttctggttaccagcaacataggaaattgtcgttgaactacatgttgtaaggctttagagaaataagggagtgtcctatttaggatgaggtgctccggtggcagccccaccaaaacctctagcgactaggaacagctatatcgggttgctatagcagtcaggatgtcattctggcgttccgaaatacccaaacct

SEQ ID NO: 1605 - DNA, 170 bp, Artificial Sequence
  SV40
gccgctgctgcaattgaagtgcaacttgcatctgttgctactgttgaaggcctaacaacctctgaggcaattgctgctataggcctcactccacaggcctatgctgtgatatctggggctcctgctgctatagctggatttgcagctttactgcaaactgtgactggtgt

SEQ ID NO: 1606 - DNA, 1040 bp, Artificial Sequence
  Theiler's murine encephalomyelitis virus (TMEV)
ttgaaagggggcccgggggatctcccccgcggtaactggtgacagttgtcgcggacggagatcatcccccggttaccccctttcgacgcgggtactgcgatagtgccaccccagtctttcctactcccgactcccgaccctaacccaggttcctcggaacaggaacaccaatttactcatcccctggatgctgactaatcagaggaacgtcagcattttccggcccaggctaagagaagtagataagttagaatccaaattgatttatcatccccttgacgaattcgcgttggaaaaacacctctcacttgccgctcttcacacccattaatttaattcggcctctgtgttgagccccttgttgaagtgtttccctccatcgcgacgtggttggagatctaagtcaaccgactccgacgaaactaccatcatgcctccccgattatgtgatgctttctgccctgctgggtggagcaccctcgggttgagaaaaccttcttcctttttccttggactccggtcccccggtctaagccgctcggaatatgacagggttattttcacctcttcttttctactccacagtgttctatactgtggaagggtatgtgttgccccttccttcttggagaacgtgcgcggcggtctttccgtctctcgacaagcgcgcgtgcaacatacagagtaacgcgaagaaagcagttctcggtctagctctagtgcccacaagaaaacagctgtagcgaccacacaaaggcagcggaacccccctcctggtaacaggagcctctgcggccaaaagccacgtggataagatccacctttgtgtgcggtgcaaccccagcaccctggtttcttggtgacactctagtgaacccctgaatggcaatctcaagcgcctctgtagggaagccaagaatgtccaggaggtaccccttcctctcggaagggatctgacctggagacacatcacacgtgctttacacctgtgcttgtgtttaaaaattgttacagcttccccgaaccaagtggtcttggtt

SEQ ID NO: 1607 - DNA, 231 bp, Artificial Sequence
  TMV_type1
cctaaagttgatctcgaaacttggtgctaaacacatcaaggattgggaacacttggaggagttcagaaggtctctttgtgatgttgctgtttcgttgaacaattgtgcgtattacacacagttggacgacgctgtatgggaggttcataagaccgcccctccaggttcgtttgtttataaaagtctggtgaagtatttgtctgataaagttctttttagaagtttgtttat

SEQ ID NO: 1608 - DNA, 694 bp, Artificial Sequence
  Triatoma virus nonstructural protein precursor
caaaattgcgtgcgagaaagcacgcaaatcaaagtctagtgcgtaattcactcactaccggcgtaatttgtggttatgctattgcgttgagagtgttgtgggcgtagtacgggggcttttggtttgtgtgtgattaatatgcattcccagttttgtttagttttagattactgatttatttttcgaactacccgaatttatttaggctcttcgagaaataatgatgaactgtcctcaacaagtatgaaaagcaattatttgtgaagttacttgttgttgtaagattattgacctcttagatttttctaagttgtaatgctttgttttctgattgactagattatgaatccaattaaaaggagtagtggtctaatatagtctgtgtgacctgcaggcattttgtgaaaagggtaaagtatgaaagctactctcagaaaagtacttatgtattgatgagagccttaaaatgactttatattcacaaaactgctggaagacaatgatctggggtatcacattccctcttaggttaagtttcgcactactaggaatttttgcgaaaattcttaattccattcttatggtgtagtgtttgttcttttcaattggggcgtatctctctttcgcagagaccctggcccaaccctgaaatgaataaaattttacaaaaattcatcgaaaatcgaccttctag

SEQ ID NO: 1609 - DNA, 250 bp, Artificial Sequence
  Taura syndrome virus
tagcaccacccgatcgtaaactccatgtattggttacccatctgcatcgaaaactctccgaacactaggtgcagtaaggctttcatggagtggtttgctatttagcgtacgtgtaccataggcagccccaaaaacacgtgtgaggagaaagtcccagtcactttgggcaaagtagacagccgcgcttgcgtggtgggacttaattaatgcctgctaacccagttgaaattgataattttgatacaacaac

SEQ ID NO: 1610 - DNA, 252 bp, Artificial Sequence
  Drosophila melanogaster CG1028-PJ
agtttcaaaatcaaaattgaggaataccaactagaggataaggctacttaaggatcaaaaaacaccaaggagacgagattttctaccaaatcgagagacgaggggcaggttaatttcgtcatttttggccaagacagcaaatagaggaacagcaaagcgaaaatcattttatacctcacacaacaactacacactaactaagattaggctacgcaactgtacattgtacttaagtgttcaaagtatatttag

SEQ ID NO: 1611 - DNA, 583 bp, Artificial Sequence
  Mus musculus apoptotic protease activating factor 1
cggcttgaggcagagaccaggaggcagctagaggagcagacgtctcactccgctcgcggaagggtgtgagaggggtgtgtgggggtcggcagcgaggggtgtgtgccatcagccaccggcgacgatctgagacagtcgcagcggctttccgagcggcgtccgcttcccgcccgggcagctcccgccagaggggtgaagcggcgactggagtggccgtgcttttgtgccctgggtcccggtaccctcccctggtgcggcccgaggcaagcccaccgaggtgaccacccctcgacgccgcttggagatcccgggcatccaccctgcgccccgagcagctgatacccagggaggtgtcaggacctgcccggggcgcggggtcgccggaagccaggcgggagccccggctgctttctggcaatctagtctcataagtgaccctccctgggctgctttctttcgattatcatcagtgaccctaccccggctgctcttcccagcacaactccggtgcaaaggcttgggcatcctggtgctttgcctctagcccatgctccacagcgaggagagagaaaaccctgaggca

SEQ ID NO: 1612 - DNA, 284 bp, Artificial Sequence
  Human mercurial-insensitive water channel mRNA
ggacagtttggataattttccgtgaaactggatgatctttgaatattaaatgaaaggagactagaataacagtctcttgactattcatgaaggagctttagcaggagcattctttcttggtgtgcaaatcacgcctggcagcccctgcccacagtacccgaagatggcaggccttgttcccttcacctaaattcataaacctgggtgtagtggcttctgatgctgatttgtttctcttttcagtaagtgtggacctttgtgtaccagagagaacatcatggtgg

SEQ ID NO: 1613 - DNA, 356 bp, Artificial Sequence
  hAT1R-B
attccagcgcctgacagccaggaccccaggcagcagcgagtgacaggacgtctggaccggcgcgccgctagcagctctgccgggccgcggcggtgatcgatggggagcggctggagcggacccagcgagtgagggcgcacagccgggacgccgaggcggcgggcgggagacccgcaccagcgcagccggccctcggcgggacgtgacgcagcgcccggggcgcgggtttgatatttgacaaattgatctaaaatggctgggtttttatctgaataactcactgatgccatcccagaaagtcggcaccaggtgtatttgatatagtgtttgcaacaaattcgacccaggtgatcaaa

SEQ ID NO: 1614 - DNA, 272 bp, Artificial Sequence
  Homo sapiens angiotensin II receptor, type 1
attccagcgcctgacagccaggaccccaggcagcagcgagtgacaggacgtctggaccggcgcgccgctagcagctctgccgggccgcggcggtgatcgatggggagcggctggagcggacccagcgagtgagggcgcacagccgggacgccgaggcggcgggcgggagacccgcaccagcgcagccggccctcggcgggacgtgacgcagcgcccggggcgcgggtgtatttgatatagtgtttgcaacaaattcgacccaggtgatcaaa

SEQ ID NO: 1615 - DNA, 366 bp, Artificial Sequence
  Homo sapiens BCL2-associated athanogene (BAG1)
ctgggcggtcaacaagtgcgggcctggctcagcgcgggggggcgcggagaccgcgaggcgaccgggagcggctgggttcccggctgcgcgcccttcggccaggccgggagccgcgccagtcggagcccccggcccagcgtggtccgcctccctctcggcgtccacctgcccggagtactgccagcgggcatgaccgacccaccaggggcgccgccgccggcgctcgcaggccgcggatgaagaagaaaacccggcgccgctcgacccggagcgaggagttgacccggagcgaggagttgaccctgagtgaggaagcgacctggagtgaagaggcgacccagagtgaggaggcgacccagggcgaag

SEQ ID NO: 1616 - DNA, 301 bp, Artificial Sequence
  Chicken jun oncogene
gcgccggagcgggcagggccgagcggcagcgcggagccggggtactcgcggcggcggcggcggcggcaggagcggcgcggcccggcccggcggcggcacagcgcggcgaggcggcccgggaagcacagcgaggcccgcggggcgccgcccgcgccgggaggagcggcggcgtcccggcgagaagtaagagctccgcgcactccttcctccaacccgcgcggccgggagcggtgtggggcggcggccgggaccgtccagcgcgctgccgcggctcccggcgccactccgcgggctctgttct

SEQ ID NO: 1617 - DNA, 381 bp, Artificial Sequence
  Human protein kinase PITSLRE alpha 2-2 mRNA
catcaccgaacgatgagagaggactacagcgacaaagtgaaagccagccactggagtcgcagcccgcctcggccgccgcgggagcggttcgagttgggagacggccggaagccagtaaaagaagagaaaatggaagaaagggacctgctgtccgacttacaggacatcagcgacagcgagaggaagaccagctcggccgagtcctcgtcagcagaatcaggctcaggttctgaggaagaagaggaggaggaggaagaggaggaggaggaagggagcaccagtgaagaatcagaggaggaagaggaagaggaggaggaggagaccggcagcaactctgaggaggcatcagagcagtctgccgaagaagtaagtgaggaagaa

SEQ ID NO: 1618 - DNA, 168 bp, Artificial Sequence
  Drosophila melanogaster CG4319-PA (rpr)
tgaataagagagacaccagaacaaagtgaacgaactcgaaaatacgaaagaaaagtgtgtgcgccagcaacaaagaactaactcgataaatattcattgtgcagaagagaaagttattgagtcactaccagttgtgtaattccgaacgagaagaaagataaaccaaca

SEQ ID NO: 1619 - DNA, 365 bp, Artificial Sequence
  Canis familiaris scamper mRNA
ttaagatactttttctaaaaagatttatttccagagtgttcccatgttggtttaaaattcactgttttcaacattttagagcaatacctcatctacttgattttgtgtctgctgaagtcttcggttgctgccagaggcagcacttgaccctggggttgcacctgcagacctgaaatgggtaaaggcacaagcatgagtaaactatgattccagatacattttttataagtatgaagacattatcccaaggcatcactgtttaaaggttcagaacttaagcagaaaaagaaacccttcctacagtaaggaacaaaggttctaatgacatttcttctaattcctctataatttccaggattcatcat

SEQ ID NO: 1620 - DNA, 188 bp, Artificial Sequence
  mRNA transcript from chromosome 5 of transcription initiation factor TFIID TBP subunit
agggacgtgaaaattacagtagttactgttttttttggactataagatcgggggaaagataacacataagaaataaaacgactactagttagactgctctgcggaagaagcaaggaagtaaaggctgcattttatttttcttttctagtccaacataaacaggtgtatcaagagaaacttttttaatt

SEQ ID NO: 1621 - DNA, 429 bp, Artificial Sequence
  Homo sapiens cold shock domain containing E1
tgctgcttatggcggcgctggagagggggcgctgagctgttgggtatgaagtgtaacagaacagactttaccacctgaaactgctgcttcaagttcagatcaggcaaggaacaaacctcgtaacaactaacaagaccaaagaagagtacacttaagttgaagacacaacacttgatctgaaacaagaagtttgtgcctactcaacagctttgaaagagcacttcccaacgctgctagtagtctttgttttcttcagtgctgtactgtgagattgcccggtacagcagcagttgtattctttattagcttggtagatcattttctctcgctcttttttttaatactagcaactttcatcctttgaaacgtgtgctgaaaaagaagaatcagcaaatactactgaaagtgcaatatttgagtatcactgcg

SEQ ID NO: 1622 - DNA, 224 bp, Artificial Sequence
  Rattus norvegicus cationic amino acid transporter-1 (Cat1)
atgaaaccggctcggattccgcccgcgtgcgccatcccctcagctagcaggtgtgagcggctttctgcccgcagtctctacacagctcagcatcctgacgcctcctccccttgcaggggcgtgaagctacttcagactctgctgtgacgacttggccgccaggcaccgatcctccccggtgagaaggtccacgaatcttactgcagacagatttgctcagcgcg

SEQ ID NO: 1623 - DNA, 209 bp, Artificial Sequence
  Homo sapiens cyclin D1 (CCND1), mRNA
cacacggactacaggggagttttgttgaagttgcaaagtcctggagcctccagagggctgtcggcgcagtagcagcgagcagcagagtccgcacgctccggcgaggggcagaagagcgcgagggagcgcggggcagcagaagcgagagccgagcgcggacccagccaggacccacagccctccccagctgcccaggaagagccccagcc

SEQ ID NO: 1624 - DNA, 305 bp, Artificial Sequence
  Death-associated protein 5 (DAP5)
cagcagtgagtcggagctctatggaggtggcagcgggtaccgagtggcggctgcagcagcgactcctctgagctgagtttgaggccgtccccgactccttcctcccccttccctcccccttttttttgttttccgttcccctttcccctcccttccctatccccgacgaccggatcctgaggaggcagctgcggtggcagctgctgagttctcggtgaaggtatttcatttctcctgtcccctcccctccccaccccatctattaatattattcttttgaagattcttcgttgtcaagccgccaa

SEQ ID NO: 1625 - DNA, 327 bp, Artificial Sequence
  Eukaryotic translation initiation factor 4 gamma, isoform II, long.
gtcccccctcctcacccgaacatcagggccctccagactcaggcgccccaacaaattcctagaggacctgtgcaacaacctcttgaggatcgaatcttcactcccgctgtctcagcagtctacagcacggtaacacaagtggcaagacagccgggaacccctaccccatccccttattcagcacatgaaataaacaaggggcatccaaatcttgcggcaacgcccccgggacatgcatcgtcccctggactctctcaaaccccttatccctctggacagaatgcaggtccaaccacgctggtataccctcaaacccctcagacaatg

SEQ ID NO: 1626 - DNA, 319 bp, Artificial Sequence
  A. californica egg-laying hormone mRNA
ctttaccgacaacgtccagcggtccagtcgagaagtaagtagtccgcgctgcgagcataactctaccagagaaacgcgcactttattggtcaagacagacggaagccggcggttggacgcaaaggttgactcggaagctgagagattgttgagtaacacgcagaagtcttgaaagtatcaagtattgaacatatttcaagggacttggtttcggtgaagtcgtcaattccttttatcgtcaacgtttccacagccctcagaatagaaatttccaacaagccaaagcctacgtaatgaagcgccccaataaccggccgac

SEQ ID NO: 1627 - DNA, 434 bp, Artificial Sequence
  full-length fibroblast growth factor 1 (acidic)
gtgggcataccagtgtcagctgcacttgtaggggcccaagtgcctcatgacccactcggcagccttcctctccaggatccccaaggctaggaggccaacctactaacaggtgggtgggtatggtgtgtggtttcactcagttcttctcatggggtttctctgagctccattcataccagaaagggagcaggagagagaggacaagtggatccaacagccttcgctccaggggaatcagggcatcgcctccttttctgggaggacactcccttctgatggtgaatgggaactcccttcctcctgcagcagcctgcctgcagctgtcctggtagaacagtgtggacattgcagaagctgtcactgccccagaaagaaagcaccccagagccaaggcaaagagtcttgaaagcgccacaagcagcagctgctgagcc

SEQ ID NO: 1628 - DNA, 252 bp, Artificial Sequence
  Homo sapiens fragile X mental retardation 1 (FMR1)
ggcctcagtcaggcctcagctccgtttcggtttcacttccggtggagggccgcctctgagcgggcggcgggccgacggcgagcgcgggcggcggcggtgacggaggcgccgctgccagggggcgtgcggcagcgcggcggcggcggcggcggcggcggcggcggcggcggcggcggcggcggctgggcctcgagcgcccgcagcccacctctcgggggcgggctcccggcgctagcagggctgaagagaaca

SEQ ID NO: 1629 - DNA, 166 bp, Artificial Sequence
  Mus musculus Gtx mRNA sequence.
ccgccgcccattcagcgcaacagccgtcggtcctctcgctttcccgtaggggccgtcggcgttcgtttgaaacgcggtccacccgtcccagcgtagccggcgctcttcggcgccgcgcgcaaacttcccgagccggcgggtgcgggcggtggcagcggggcccgga

SEQ ID NO: 1630 - DNA, 435 bp, Artificial Sequence
  D. melanogaster mRNA for hairless serine rich protein
cagacaacaatgaccgatgagcataaaagtaacattaacagtaacagcagtcactccagcaacaacaacaacaacggcagcagcagcaataacgacaacaacagcaacgacgacgcagcaagtagcagcaacagcaaaaacaacaacaccagcaacgagagcagccacagcaacaacaatactagtagcataattgcagaggcggccgccaagtttctactgaaaaatggcctaaacggcagtagcagcaccagctacccccctctgccaccgcctctgcccgccaacttaagcaggacgaccacgcccacgacaacgacaacgccctcatcctccagctccaccgcctcaaatggctttttgccgcatgccaagacgcccaaaagtagtagcattatggctgcgtccgccgcagtggcagccagcgtcgttgga

SEQ ID NO: 1631 - DNA, 270 bp, Artificial Sequence
  HAP4
taaaccccagttttatatcgtatatgctatctacaggtccactttacacttaataatataaaaatactactataaaggaaccagaaaaataaaaaagggtcattatttatttgagcagatcattatcaaacgcataggaagagaaaaaacacagttttattttttttccacacatatttattggtctcctagtacatcaaagagcattttaatgggttgctgatttgttttacctacattttctagtacaaaaaaaaaacaaaaaaagaa

SEQ ID NO: 1632 - DNA, 161 bp, Artificial Sequence
  Zea mays heat shock protein 101 (HSP101) gene.
ggcacgagagaaaaactagccgaagcaaacccattccacaagcacctggtgggatcatctcatcatcagaaacaaagagagagattccgtgcccacttgttgtagtagattgtgaggattgaggagtagcaaagagaagcagccatgaatccggacaactt

SEQ ID NO: 1633 - DNA, 193 bp, Artificial Sequence
  Homo sapiens heat shock 70kDa protein 1A (HSPA1A)
ctgcgacagtccactacctttttcgagagtgactcccgttgtcccaaggcttcccagagcgaacctgtgcggctgcaggcaccggcgcgtcgagtttccggcgtccggaaggaccgagctcttctcgcggatccagtgttccgtttccagcccccaatctcagagcggagccgacagagagcagggaaccggc

SEQ ID NO: 1634 - DNA, 503 bp, Artificial Sequence
  Drosophila melanogaster CG31366-PA (Hsp70Aa)
gaatattctagaatcccaaaacaaactggttgttgcggtaggtcatttgtttggcagaaagaaaactcgagaaatttctctggccgttattctctattcgttttgtgactctccctctttgtactattgctctctcactctgtcacacagtaaacggcgcactgttctcgttgcttcgagagagcgcgcctcgaatgttcgcgaaaagagcgccggagtataaatagaggagcttcgtcgacggagagtcaattctattcaaacaagtaaagtgaacacatcgctaagcgaaagctaagcaaacaaacaagcgcagctgaacaagctaaacaatctgcaataaagtgcaagttaaagtgaatcaattaaaagtaaccaacaaccaagtaattaaactaaaaactgcaactactgaaatcaaccaagaagtaattattgaagacaagaagagaactctgaatactttcaacaagtcgttaccgaggaagaagaactcacacaca

SEQ ID NO: 1635 - DNA, 149 bp, Artificial Sequence
  Hsp90
agtcttgaaaaaaatttcgtacggtgtgcgtcgtaacaacaagcagcgtctgaaaagttttgtgaatttccaattctatacaaagcaaagtgaaaatatctgtatttttacctttattctgtgaatagaacgaaaaacatacatacaag

SEQ ID NO: 1636 - DNA, 120 bp, Artificial Sequence
  hsIGF2
gcgaccgggcattgcccccagtctcccccaaatttgggcattgtccccgggtcttccaacggactgggcgttgctcccggacactgaggactggccccggggtctcgctcaccttcagca

SEQ ID NO: 1637 - DNA, 217 bp, Artificial Sequence
  Human L-myc protein gene
aatgcgcctgcagctcgcgctcccgcgccgatcccgagagcgtccgggccgccgtgcgcgagcgagggagggcgcgcgcgcggggggggcgcgcttgtgagtgcgggccgcgctctcggcggcgcgcatgtgcgtgtgtgctggctgccgggctgccccgagccggcggggagccggtccgctccaggtggcgggcggctggagcgagggagcggac

SEQ ID NO: 1638 - DNA, 335 bp, Artificial Sequence
  Homo sapiens laminin, beta 1 (LamB1)
gggacctggaagcgccccagccccgcagcgatcgcagattcggctttcaaacaaaagaggcgccccggggggtgggaccgggacctcacccggtcctcgcagagttgcggccgcccgccccttcagccccggctctccgtatgcgcatgagcagaggcgcctccctctgttcctcccaaggctaaactttctaattcccttctttgggctcgggggctcccggagcagggcgagagctcgcgtcgccggaaaggaagacgggaagaaagggcaggcggctcggcgggcgtcttctccactcctctgccgcgtccccgtggctgcagggagccggc

SEQ ID NO: 1639 - DNA, 203 bp, Artificial Sequence
  Homo sapiens MAX binding protein (MNT)
ttatattttgcaaatattttgagagacattgatttttctccccgtgctcccccgttcttccctgcggagtgcgctgcgccgcccagccctgtcgccccccggaggtgatccctccctcctgcctgcccgccagcctgacctgtgcccggctcgcgggccgcagcctcggccccggcgcgcccccggcagctctcggcgcgatg

SEQ ID NO: 1640 - DNA, 199 bp, Artificial Sequence
  Homo sapiens runt-related transcription factor 1 translocated to, 1 (cyclin D-related) (RUNX1T1)
gcaatccggagtgtcagctctccatctgtctctgcctggcaggcgcacgcgcccagcaccctgcctccggcgatgccgccccagcccctctgatggccctcctctctgctgccactcattccagaacaggaggcatgagcccggaacgcgcttgcttttaggagacagccactttctgtgtggtacgctggattcaagg

SEQ ID NO: 1641 - DNA, 150 bp, Artificial Sequence
  Homo sapiens v-myb myeloblastosis viral oncogene homolog (avian) (MYB)
atatcaacctgtttcctcctcctccttctcctcctcctccgtgacctcctcctcctctttctcctgagaaacttcgccccagcggtgcggagcgccgctgcgcagccggggagggacgcaggcaggcggcgggcagcgggaggcggcagc

SEQ ID NO: 1642 - DNA, 320 bp, Artificial Sequence
  Homo sapiens v-myc myelocytomatosis viral related oncogene
gtctggacgcgctgggtggatgcggggggctcctgggaactgtgttggagccgagcaagcgctagccaggcgcaagcgcgcacagactgtagccatccgaggacacccccgcccccccggcccacccggagacacccgcgcagaatcgcctccggatcccctgcagtcggcgggagtgttggaggtcggcgccggcccccgccttccgcgccccccacgggaaggaagcacccccggtattaaaacgaacggggcggaaagaagccctcagtcgccggccgggaggcgagccgatgccgagctgctccacgtccaccatg

SEQ ID NO: 1643 - DNA, 453 bp, Artificial Sequence
  Nicotiana tabacum NtHSF1
ggcacgaggctcccattaatatttcttcttctgtgtaattccattattctgtagtagattcacgtccgagtttaaagaagagagaaaactgaaaaggcagaaaattccagagctttagatttagccaaagatagttatggtcgtgttgttcttggtgaagattggcaaagtaggagccaatggaagaaactaagatcataatcaatcgccccaaaaacaaccttgttcattctatggtttttctcttcggtttctatgtttgggattgggaattcctcactgtccttttgcttttcagttattgctccttctaattttccctagctaggatcttctcaattaatttcctttttcattttcaactaactcataattagcccaaatcttcaaaagagttttgtgtaagttgatagacgtttagagaaacagagaaatacaggggaaaaacaaggg

SEQ ID NO: 1644 - DNA, 303 bp, Artificial Sequence
  Rat ornithine decarboxylase (ODC
gtcagtccctgcagccgccgccgccggccgccttcagtcagcagctcggcgccacctccggtcggcgactgcggcgggctcgacgaggcggctgacggggcggcggcgggaagacggccgggtgcgccttggggtttagtggcggcttctccatgggtccagccagccgcttccctgtgctgtgagtgtttccaccactccaggagacagcattcagagttgaccttgtgagagctggccataatttaattccatctctaggttttctgtcttattgtttcagaggcacatcgagaaccaacc

SEQ ID NO: 1645 - DNA, 152 bp, Artificial Sequence
  Homo sapiens cyclin-dependent kinase inhibitor 1B (p27, Kip1) (CDKN1B
gggccgtggctcgtcggggtctgtgtcttttggctccgagggcagtcgctgggcttccgagaggggttcgggccgcgtaggggcgctttgttttgttcggttttgtttttttgagagtgcgagagaggcggtcgtgcagacccgggagaaag

SEQ ID NO: 1646 - DNA, 142 bp, Artificial Sequence
  Homo sapiens p53 protein mRNA
tcactgccatggaggagccgcagtcagatcctagcgtcgagccccctctgagtcaggaaacattttcagacctatggaaactacttcctgaaaacaacgttctgtcccccttgccgtcccaagcaatggatgatttgatgct

SEQ ID NO: 1647 - DNA, 166 bp, Artificial Sequence
  Ure2
agccaaaataatgataacgagaataatatcaagaataccttagaacaacatcgacaacaacaacaggcattttcggatatgagtcacgtggagtattccagaattacaaaattttttcaagaacaaccactggagggatatacccttttctctcacaggtctgcgc

SEQ ID NO: 1648 - DNA, 506 bp, Artificial Sequence
  Mus musculus utrophin (Utrn), mRNA.
ttgtggagtcgcccttcccccgaggaggggagcgggcagcgccgggcgcgggatttctcccgcccagggccgaggaggagccctgggctcctcaaccgatcgggccacctccgggagcggcgccccttttctttcgggtcattcctgcagagggaaaactcctgcgtgcgcctgcccccaggctagcgtttggactgttttgtttttggcggaactaccgggcaggaagattgcacaagtcagggggcgtttccaatcgggtgtcaattttggatctccccccccccacccccctttggatcttgtcgggctttccacgtttcacttaaaaaaaattcttgtaacgtccaaggcaagctccccacgacccgaacacgcccagaggaaccttggggcctctggggacttggctagcaggtattcatgctagcctggaccatttttcagatttagccttcagaagaggatctgggaaagcctttggattatactgaaactcattcaag

SEQ ID NO: 1649 - DNA, 461 bp, Artificial Sequence
  FMDV(c-s8c1)-IRES
agcaggtttccccaactgacacaaaacgtgcaacttgaaactccgcctggtctttccaggtctagaggggtaacactttgtactgcgtttggctccacgctcgatccactggcgagtgttagtaacagcactgttgcttcgtagcggagcatgacggccgtgggaactcctccttggtaacaaggacccacggggccaaaagccacgcccacacgggcccgtcatgtgtgcaaccccagcacggcgactttactgcgaaacccactttaaagtgacattgaaactggtacccacacactggtgacaggctaaggatgcccttcaggtaccccgaggtaacacgcgacactcgggatctgagaaggggactggggcttctataaaagcgctcggtttaaaaagcttctatgcctgaataggtgaccggaggtcggcacctttcctttacaattaaagaccct

SEQ ID NO: 1650 - DNA, 107 bp, Artificial Sequence
  SIRES
ccatgcatttctgacatttctgacatttctgacatttctgacatttctgacatttctgacatttctgacatttctgacatttctgacatttctgacatagatctacc

SEQ ID NO: 1651 - DNA, 679 bp, Artificial Sequence
  EMCV-IRES-1
ccatgcatttgaaagccgggggtgggagatccggattgccagtctgctcgatatcgcaggctgggtccgtgactacccactccccctttaattccgcccctctccctcccccccccctaacgttactggccgaagccgcttggaataaggccggtgtgcgtttgtctatatgttattttccaccatattgccgtcttttggcaatgtgagggcccggaaacctggccctgtcttcttgacgagcattcctaggggtctttcccctctcgccaaaggaatgcaaggtctgttgaatgtcgtgaaggaagcagttcctctggaagcttcttgaagacaaacaacgtctgtagcgaccctttgcaggcagcggaaccccccacctggcgacaggtgcctctgcggccaaaagccacgtgtataagatacacctgcaaaggcggcacaaccccagtgccacgttgtgagttggatagttgtggaaagagtcaaatggctctcctcaagcgtattcaacaaggggctgaaggatgcccagaaggtaccccattgtatgggatctgatctggggcctcggtgcacatgctttacgtgtgtttagtcgaggttaaaaaacgtctaggccccccgaaccacggggacgtggttttcctttgaaaaacacgatgataatagatctacc

SEQ ID NO: 1652 - DNA, 670 bp, Artificial Sequence
  EMCV-IRES-2
ggcatatgttgaaagccgggggtgggagatccggattgccagtctgctcgatatcgcaggctgggtccgtgactacccactccccctttaattccgcccctctccctcccccccccctaacgttactggccgaagccgcttggaataaggccggtgtgcgtttgtctatatgttattttccaccatattgccgtcttttggcaatgtgagggcccggaaacctggccctgtcttcttgacgagcattcctaggggtctttcccctctcgccaaaggaatgcaaggtctgttgaatgtcgtgaaggaagcagttcctctggaagcttcttgaagacaaacaacgtctgtagcgaccctttgcaggcagcggaaccccccacctggcgacaggtgcctctgcggccaaaagccacgtgtataagatacacctgcaaaggcggcacaaccccagtgccacgttgtgagttggatagttgtggaaagagtcaaatggctctcctcaagcgtattcaacaaggggctgaaggatgcccagaaggtaccccattgtatgggatctgatctggggcctcggtgcacatgctttacgtgtgtttagtcgaggttaaaaaacgtctaggccccccgaaccacggggacgtggttttcctttgaaaaacacgattataat

SEQ ID NO: 1653 - DNA, 561 bp, Artificial Sequence
  EMCV-IRES-3
cccccccctaacgttactggccgaagccgcttggaataaggccggtgtgcgtttgtctatatgttattttccaccatattgccgtcttttggcaatgtgagggcccggaaacctggccctgtcttcttgacgagcattcctaggggtctttcccctctcgccaaaggaatgcaaggtctgttgaatgtcgtgaaggaagcagttcctctggaagcttcttgaagacaaacaacgtctgtagcgaccctttgcaggcagcggaaccccccacctggcgacaggtgcctctgcggccaaaagccacgtgtataagatacacctgcaaaggcggcacaaccccagtgccacgttgtgagttggatagttgtggaaagagtcaaatggctctcctcaagcgtattcaacaaggggctgaaggatgcccagaaggtaccccattgtatgggatctgatctggggcctcggtgcacatgctttacatgtgtttagtcgaggttaaaaaacgtctaggccccccgaaccacggggacgtggttttcctttgaaaaacacgatgataat

SEQ ID NO: 1654 - DNA, 671 bp, Artificial Sequence
  EMCV-IRES-4
ttgaaagccgggggtgggagatccggattgccagtctgctcgatatcgcaggctgggtccgtgactacccactccccctttaattccgcccctctccctcccccccccctaacgttactggccgaagccgcttggaataaggccggtgtgcgtttgtctatatgttattttccaccatattgccgtcttttggcaatgtgagggcccggaaacctggccctgtcttcttgacgagcattcctaggggtctttcccctctcgccaaaggaatgcaaggtctgttgaatgtcgtgaaggaagcagttcctctggaagcttcttgaagacaaacaacgtctgtagcgaccctttgcaggcagcggaaccccccacctggcgacaggtgcctctgcggccaaaagccacgtgtataagatacacctgcaaaggcggcacaaccccagtgccacgttgtgagttggatagttgtggaaagagtcaaatggctctcctcaagcgtattcaacaaggggctgaaggatgcccagaaggtaccccattgtatgggatctgatctggggcctcggtgcacatgctttacgtgtgtttagtcgaggttaaaaaacgtctaggccccccgaaccacggggacgtggttttcctttgaaaaacacgatgataatagatctacc

SEQ ID NO: 1655 - DNA, 683 bp, Artificial Sequence
  EMCV-IRES-5
ccagatccgcgtttgaaagccgggggtgggagatccggattgccagtctgctcgatatcgcaggctgggtccgtgactacccactccccctttaattccgcccctctccctcccccccccctaacgttactggccgaagccgcttggaataaggccggtgtgcgtttgtctatatgttattttccaccatattgccgtcttttggcaatgtgagggcccggaaacctggccctgtcttcttgacgagcattcctaggggtctttcccctctcgccaaaggaatgcaaggtctgttgaatgtcgtgaaggaagcagttcctctggaagcttcttgaagacaaacaacgtctgtagcgaccctttgcaggcagcggaaccccccacctggcgacaggtgcctctgcggccaaaagccacgtgtataagatacacctgcaaaggcggcacaaccccagtgccacgttgtgagttggatagttgtggaaagagtcaaatggctctcctcaagcgtattcaacaaggggctgaaggatgcccagaaggtaccccattgtatgggatctgatctggggcctcggtgcacatgctttacgtgtgtttagtcgaggttaaaaaacgtctaggccccccgaaccacggggacgtggttttcctttgaaaaacacgatgataatgctagcacc

SEQ ID NO: 1656 - DNA, 690 bp, Artificial Sequence
  EMCV-IRES-6
ccactaggatctttgaaagccgggggtgggagatccggattgccagtctgctcgatatcgcaggctgggtccgtgactacccactccccctttaattccgcccctctccctcccccccccctaacgttactggccgaagccgcttggaataaggccggtgtgcgtttgtctatatgttattttccaccatattgccgtcttttggcaatgtgagggcccggaaacctggccctgtcttcttgacgagcattcctaggggtctttcccctctcgccaaaggaatgcaaggtctgttgaatgtcgtgaaggaagcagttcctctggaagcttcttgaagacaaacaacgtctgtagcgaccctttgcaggcagcggaaccccccacctggcgacaggtgcctctgcggccaaaagccacgtgtataagatacacctgcaaaggcggcacaaccccagtgccacgttgtgagttggatagttgtggaaagagtcaaatggctctcctcaagcgtattcaacaaggggctgaaggatgcccagaaggtaccccattgtatgggatctgatctggggcctcggtgcacatgctttacgtgtgtttagtcgaggttaaaaaacgtctaggccccccgaaccacggggacgtggttttcctttgaaaaacacgatgataataagcttggtcgccacc

SEQ ID NO: 1657 - DNA, 662 bp, Artificial Sequence
  EMCV-IRES-7
ttgaaagccgggggtgggagatccggattgccagtctgctcgatatcgcaggctgggtccgtgactacccactccccctttaattccgcccctctccctcccccccccctaacgttactggccgaagccgcttggaataaggccggtgtgcgtttgtctatatgttattttccaccatattgccgtcttttggcaatgtgagggcccggaaacctggccctgtcttcttgacgagcattcctaggggtctttcccctctcgccaaaggaatgcaaggtctgttgaatgtcgtgaaggaagcagttcctctggaagcttcttgaagacaaacaacgtctgtagcgaccctttgcaggcagcggaaccccccacctggcgacaggtgcctctgcggccaaaagccacgtgtataagatacacctgcaaaggcggcacaaccccagtgccacgttgtgagttggatagttgtggaaagagtcaaatggctctcctcaagcgtattcaacaaggggctgaaggatgcccagaaggtaccccattgtatgggatctgatctggggcctcggtgcacatgctttacgtgtgtttagtcgaggttaaaaaacgtctaggccccccgaaccacggggacgtggttttcctttgaaaaacacgatgataat

SEQ ID NO: 1658 - DNA, 682 bp, Artificial Sequence
  EMCV-IRES-8
ccactagagcgtttgaaagccgggggtgggagatccggattgccagtctgctcgatatcgcaggctgggtccgtgactacccactccccctttaattccgcccctctccctcccccccccctaacgttactggccgaagccgcttggaataaggccggtgtgcgtttgtctatatgttattttccaccatattgccgtcttttggcaatgtgagggcccggaaacctggccctgtcttcttgacgagcattcctaggggtctttcccctctcgccaaaggaatgcaaggtctgttgaatgtcgtgaaggaagcagttcctctggaagcttcttgaagacaaacaacgtctgtagcgaccctttgcaggcagcggaaccccccacctggcgacaggtgcctctgcggccaaaagccacgtgtataagatacacctgcaaaggcggcacaaccccagtgccacgttgtgagttggatagttgtggaaagagtcaaatggctctcctcaagcgtattcaacaaggggctgaaggatgcccagaaggtaccccattgtatgggatctgatctggggcctcggtgcacatgctttacgtgtgtttagtcgaggttaaaaaacgtctaggccccccgaaccacggggacgtggttttcctttgaaaaacacgatttgtacagcttacc

SEQ ID NO: 1659 - DNA, 680 bp, Artificial Sequence
  EMCV-IRES-9
ccactagagcgtttgaaagccgggggtgggagatccggattgccagtctgctcgatatcgcaggctgggtccgtgactacccactccccctttaattccgcccctctccctcccccccccctaacgttactggccgaagccgcttggaataaggccggtgtgcgtttgtctatatgttattttccaccatattgccgtcttttggcaatgtgagggcccggaaacctggccctgtcttcttgacgagcattcctaggggtctttcccctctcgccaaaggaatgcaaggtctgttgaatgtcgtgaaggaagcagttcctctggaagcttcttgaagacaaacaacgtctgtagcgaccctttgcaggcagcggaaccccccacctggcgacaggtgcctctgcggccaaaagccacgtgtataagatacacctgcaaaggcggcacaaccccagtgccacgttgtgagttggatagttgtggaaagagtcaaatggctctcctcaagcgtattcaacaaggggctgaaggatgcccagaaggtaccccattgtatgggatctgatctggggcctcggtgcacatgctttacgtgtgtttagtcgaggttaaaaaacgtctaggccccccgaaccacggggacgtggttttcctttgaaaaacacgatttgtagcttacc

SEQ ID NO: 1660 - DNA, 679 bp, Artificial Sequence
  EMCV-IRES-10
ggcatatgttgaaagccgggggtgggagatccggattgccagtctgctcgatatcgcaggctgggtccgtgactacccactccccctttaattccgcccctctccctcccccccccctaacgttactggccgaagccgcttggaataaggccggtgtgcgtttgtctatatgttattttccaccatattgccgtcttttggcaatgtgagggcccggaaacctggccctgtcttcttgacgagcattcctaggggtctttcccctctcgccaaaggaatgcaaggtctgttgaatgtcgtgaaggaagcagttcctctggaagcttcttgaagacaaacaacgtctgtagcgaccctttgcaggcagcggaaccccccacctggcgacaggtgcctctgcggccaaaagccacgtgtataagatacacctgcaaaggcggcacaaccccagtgccacgttgtgagttggatagttgtggaaagagtcaaatggctctcctcaagcgtattcaacaaggggctgaaggatgcccagaaggtaccccattgtatgggatctgatctggggcctcggtgcacatgctttacgtgtgtttagtcgaggttaaaaaacgtctaggccccccgaaccacggggacgtggttttcctttgaaaaacacgatgataattctagaacc

SEQ ID NO: 1661 - DNA, 677 bp, Artificial Sequence
  EMCV-IRES-11
atgcatttgaaagccgggggtgggagatccggattgccagtctgctcgatatcgcaggctgggtccgtgactacccactccccctttaattccgcccctctccctcccccccccctaacgttactggccgaagccgcttggaataaggccggtgtgcgtttgtctatatgttattttccaccatattgccgtcttttggcaatgtgagggcccggaaacctggccctgtcttcttgacgagcattcctaggggtctttcccctctcgccaaaggaatgcaaggtctgttgaatgtcgtgaaggaagcagttcctctggaagcttcttgaagacaaacaacgtctgtagcgaccctttgcaggcagcggaaccccccacctggcgacaggtgcctctgcggccaaaagccacgtgtataagatacacctgcaaaggcggcacaaccccagtgccacgttgtgagttggatagttgtggaaagagtcaaatggctctcctcaagcgtattcaacaaggggctgaaggatgcccagaaggtaccccattgtatgggatctgatctggggcctcggtgcacatgctttacgtgtgtttagtcgaggttaaaaaacgtctaggccccccgaaccacggggacgtggttttcctttgaaaaacacgatgataatagatctacc

SEQ ID NO: 1662 - DNA, 679 bp, Artificial Sequence
  EMCV-IRES-12
ggatgcatttgaaagccgggggtgggagatccggattgccagtctgctcgatatcgcaggctgggtccgtgactacccactccccctttaattccgcccctctccctcccccccccctaacgttactggccgaagccgcttggaataaggccggtgtgcgtttgtctatatgttattttccaccatattgccgtcttttggcaatgtgagggcccggaaacctggccctgtcttcttgacgagcattcctaggggtctttcccctctcgccaaaggaatgcaaggtctgttgaatgtcgtgaaggaagcagttcctctggaagcttcttgaagacaaacaacgtctgtagcgaccctttgcaggcagcggaaccccccacctggcgacaggtgcctctgcggccaaaagccacgtgtataagatacacctgcaaaggcggcacaaccccagtgccacgttgtgagttggatagttgtggaaagagtcaaatggctctcctcaagcgtattcaacaaggggctgaaggatgcccagaaggtaccccattgtatgggatctgatctggggcctcggtgcacatgctttacgtgtgtttagtcgaggttaaaaaacgtctaggccccccgaaccacggggacgtggttttcctttgaaaaacacgatgataatagatctacc

SEQ ID NO: 1663 - RNA, 1975 nt, Artificial Sequence
  HA (without TM)
ggggcgcugccuacggagguggcagccaucuccuucucggcaucaagcuuaccaugaaggccauccuggugguccuccuguacaccuucgccaccgcgaacgccgacacgcugugcaucggcuaccacgccaacaacagcaccgacaccguggacaccgugcucgagaagaacgucacggugacccacuccgugaaccugcuggaggacaagcacaacgggaagcucugcaagcugcggggcgucgccccgcugcaccucgggaagugcaacaucgccggcuggauccuggggaacccggagugcgagagccuguccaccgcgagcuccuggagcuacaucguggagaccuccagcuccgacaacggcacgugcuaccccggcgacuucaucgacuacgaggagcuccgcgagcagcugagcuccgugagcuccuucgagcgguucgagaucuuccccaagaccagcuccuggcccaaccacgacagcaacaagggggucaccgccgccugcccgcacgccggcgcgaaguccuucuacaagaaccugaucuggcucgugaagaaggggaacagcuaccccaagcuguccaagagcuacaucaacgacaagggcaaggaggugcugguccucugggggauccaccaccccagcaccuccgccgaccagcagagccuguaccagaacgccgacgccuacguguucgugggcuccagccgcuacuccaagaaguucaagcccgagaucgccauccggccgaagguccgcgaccaggagggccggaugaacuacuacuggacgcugguggagcccggggacaagaucaccuucgaggcgaccggcaaccucguggucccccgcuacgccuucgccauggagcggaacgccgggagcggcaucaucaucuccgacacccccgugcacgacugcaacacgaccugccagaccccgaagggcgccaucaacaccagccugcccuuccagaacauccaccccaucacgaucgggaagugccccaaguacgugaaguccaccaagcugcgccucgcgaccggccugcggaacgucccgagcauccagucccgcgggcuguucggcgccaucgccggguucaucgagggcggcuggaccgggaugguggacggcugguacggguaccaccaccagaacgagcagggcagcggguacgccgccgaccucaaguccacgcagaacgcgaucgacgagaucaccaacaaggugaacagcgucaucgagaagaugaacacccaguucaccgccgugggcaaggaguucaaccaccuggagaagcggaucgagaaccugaacaagaaggucgacgacggcuuccucgacaucuggacguacaacgccgagcugcuggugcuccuggagaacgagcgcacccuggacuaccacgacuccaacgugaagaaccucuacgagaagguccggagccagcugaagaacaacgccaaggagaucgggaacggcugcuucgaguucuaccacaagugcgacaacaccugcauggaguccgugaagaacgggaccuacgacuaccccaaguacagcgaggaggccaagcugaaccgcgaggagaucgacggcgugaagcucgaguccacgcggaucuaccagaucugaggacuagugcaucacauuuaaaagcaucucagccuaccaugagaauaagagaaagaaaaugaagaucaauagcuuauucaucucuuuuucuuuuucguugguguaaagccaacacccugucuaaaaaacauaaauuucuuuaaucauuuugccucuuuucucugugcuucaauuaauaaaaaauggaaagaaccuagaucuaaaaaaaaaaaaaaaaaaaaaaaaaaaaaaaaaaaaaaaaaaaaaaaaaaaaaaaaaaaaaaaaugcaucccccccccccccccccccccccccccccccaaaggcucuuuucagagccaccagaauu

SEQ ID NO: 1664 - RNA, 2431 nt, Artificial Sequence
  HA (without TM)-C3d_P28
ggggcgcugccuacggagguggcagccaucuccuucucggcaucaagcuuaccaugaaggccauccuggugguccuccuguacaccuucgccaccgcgaacgccgacacgcugugcaucggcuaccacgccaacaacagcaccgacaccguggacaccgugcucgagaagaacgucacggugacccacuccgugaaccugcuggaggacaagcacaacgggaagcucugcaagcugcggggcgucgccccgcugcaccucgggaagugcaacaucgccggcuggauccuggggaacccggagugcgagagccuguccaccgcgagcuccuggagcuacaucguggagaccuccagcuccgacaacggcacgugcuaccccggcgacuucaucgacuacgaggagcuccgcgagcagcugagcuccgugagcuccuucgagcgguucgagaucuuccccaagaccagcuccuggcccaaccacgacagcaacaagggggucaccgccgccugcccgcacgccggcgcgaaguccuucuacaagaaccugaucuggcucgugaagaaggggaacagcuaccccaagcuguccaagagcuacaucaacgacaagggcaaggaggugcugguccucugggggauccaccaccccagcaccuccgccgaccagcagagccuguaccagaacgccgacgccuacguguucgugggcuccagccgcuacuccaagaaguucaagcccgagaucgccauccggccgaagguccgcgaccaggagggccggaugaacuacuacuggacgcugguggagcccggggacaagaucaccuucgaggcgaccggcaaccucguggucccccgcuacgccuucgccauggagcggaacgccgggagcggcaucaucaucuccgacacccccgugcacgacugcaacacgaccugccagaccccgaagggcgccaucaacaccagccugcccuuccagaacauccaccccaucacgaucgggaagugccccaaguacgugaaguccaccaagcugcgccucgcgaccggccugcggaacgucccgagcauccagucccgcgggcuguucggcgccaucgccggguucaucgagggcggcuggaccgggaugguggacggcugguacggguaccaccaccagaacgagcagggcagcggguacgccgccgaccucaaguccacgcagaacgcgaucgacgagaucaccaacaaggugaacagcgucaucgagaagaugaacacccaguucaccgccgugggcaaggaguucaaccaccuggagaagcggaucgagaaccugaacaagaaggucgacgacggcuuccucgacaucuggacguacaacgccgagcugcuggugcuccuggagaacgagcgcacccuggacuaccacgacuccaacgugaagaaccucuacgagaagguccggagccagcugaagaacaacgccaaggagaucgggaacggcugcuucgaguucuaccacaagugcgacaacaccugcauggaguccgugaagaacgggaccuacgacuaccccaaguacagcgaggaggccaagcugaaccgcgaggagaucgacggcgugaagcucgaguccacgcggaucuaccagaucggcgggggcgggagcggcgggggcggcuccaaguuccugaccaccgccaaggacaagaaccgcugggaggaccccgggaagcagcucuacaacguggaggccacgagcuacgcgggcgggggcggguccggcggcgggggcagcaaguuccugaccaccgccaaggacaagaaccggugggaggacccggggaagcagcuguacaacgucgaggccaccuccuacgccggcggcgggggcagcgggggcgggggcuccaaguuccucacgaccgccaaggacaagaaccgcugggaggaccccggcaagcagcuguacaacguggaggcgaccagcuacgccgggggcgggggcuccgggggcggcgggagcaaguuccugaccacggccaaggacaagaaccggugggaggaccccggcaagcagcucuacaacguggaggccaccuccuacgcgugaggacuagugcaucacauuuaaaagcaucucagccuaccaugagaauaagagaaagaaaaugaagaucaauagcuuauucaucucuuuuucuuuuucguugguguaaagccaacacccugucuaaaaaacauaaauuucuuuaaucauuuugccucuuuucucugugcuucaauuaauaaaaaauggaaagaaccuagaucuaaaaaaaaaaaaaaaaaaaaaaaaaaaaaaaaaaaaaaaaaaaaaaaaaaaaaaaaaaaaaaaaugcaucccccccccccccccccccccccccccccccaaaggcucuuuucagagccaccagaauu

SEQ ID NO: 1665 - RNA, 2056 nt, Artificial Sequence
  HA (without TM)-foldon
ggggcgcugccuacggagguggcagccaucuccuucucggcaucaagcuuaccaugaaggccauccuggugguccuccuguacaccuucgccaccgcgaacgccgacacgcugugcaucggcuaccacgccaacaacagcaccgacaccguggacaccgugcucgagaagaacgucacggugacccacuccgugaaccugcuggaggacaagcacaacgggaagcucugcaagcugcggggcgucgccccgcugcaccucgggaagugcaacaucgccggcuggauccuggggaacccggagugcgagagccuguccaccgcgagcuccuggagcuacaucguggagaccuccagcuccgacaacggcacgugcuaccccggcgacuucaucgacuacgaggagcuccgcgagcagcugagcuccgugagcuccuucgagcgguucgagaucuuccccaagaccagcuccuggcccaaccacgacagcaacaagggggucaccgccgccugcccgcacgccggcgcgaaguccuucuacaagaaccugaucuggcucgugaagaaggggaacagcuaccccaagcuguccaagagcuacaucaacgacaagggcaaggaggugcugguccucugggggauccaccaccccagcaccuccgccgaccagcagagccuguaccagaacgccgacgccuacguguucgugggcuccagccgcuacuccaagaaguucaagcccgagaucgccauccggccgaagguccgcgaccaggagggccggaugaacuacuacuggacgcugguggagcccggggacaagaucaccuucgaggcgaccggcaaccucguggucccccgcuacgccuucgccauggagcggaacgccgggagcggcaucaucaucuccgacacccccgugcacgacugcaacacgaccugccagaccccgaagggcgccaucaacaccagccugcccuuccagaacauccaccccaucacgaucgggaagugccccaaguacgugaaguccaccaagcugcgccucgcgaccggccugcggaacgucccgagcauccagucccgcgggcuguucggcgccaucgccggguucaucgagggcggcuggaccgggaugguggacggcugguacggguaccaccaccagaacgagcagggcagcggguacgccgccgaccucaaguccacgcagaacgcgaucgacgagaucaccaacaaggugaacagcgucaucgagaagaugaacacccaguucaccgccgugggcaaggaguucaaccaccuggagaagcggaucgagaaccugaacaagaaggucgacgacggcuuccucgacaucuggacguacaacgccgagcugcuggugcuccuggagaacgagcgcacccuggacuaccacgacuccaacgugaagaaccucuacgagaagguccggagccagcugaagaacaacgccaaggagaucgggaacggcugcuucgaguucuaccacaagugcgacaacaccugcauggaguccgugaagaacgggaccuacgacuaccccaaguacagcgaggaggccaagcugaaccgcgaggagaucgacggcgugaagcucgaguccacgcggaucuaccagaucggguacauccccgaggccccgcgcgacggccaggccuacgugcggaaggacggcgaguggguccugcugagcaccuuccucugaggacuagugcaucacauuuaaaagcaucucagccuaccaugagaauaagagaaagaaaaugaagaucaauagcuuauucaucucuuuuucuuuuucguugguguaaagccaacacccugucuaaaaaacauaaauuucuuuaaucauuuugccucuuuucucugugcuucaauuaauaaaaaauggaaagaaccuagaucuaaaaaaaaaaaaaaaaaaaaaaaaaaaaaaaaaaaaaaaaaaaaaaaaaaaaaaaaaaaaaaaaugcaucccccccccccccccccccccccccccccccaaaggcucuuuucagagccaccagaauu

SEQ ID NO: 1666 - RNA, 2473 nt, Artificial Sequence
  HA (without TM)-SGG-ferritin
ggggcgcugccuacggagguggcagccaucuccuucucggcaucaagcuuaccaugaaggccauccuggugguccuccuguacaccuucgccaccgcgaacgccgacacgcugugcaucggcuaccacgccaacaacagcaccgacaccguggacaccgugcucgagaagaacgucacggugacccacuccgugaaccugcuggaggacaagcacaacgggaagcucugcaagcugcggggcgucgccccgcugcaccucgggaagugcaacaucgccggcuggauccuggggaacccggagugcgagagccuguccaccgcgagcuccuggagcuacaucguggagaccuccagcuccgacaacggcacgugcuaccccggcgacuucaucgacuacgaggagcuccgcgagcagcugagcuccgugagcuccuucgagcgguucgagaucuuccccaagaccagcuccuggcccaaccacgacagcaacaagggggucaccgccgccugcccgcacgccggcgcgaaguccuucuacaagaaccugaucuggcucgugaagaaggggaacagcuaccccaagcuguccaagagcuacaucaacgacaagggcaaggaggugcugguccucugggggauccaccaccccagcaccuccgccgaccagcagagccuguaccagaacgccgacgccuacguguucgugggcuccagccgcuacuccaagaaguucaagcccgagaucgccauccggccgaagguccgcgaccaggagggccggaugaacuacuacuggacgcugguggagcccggggacaagaucaccuucgaggcgaccggcaaccucguggucccccgcuacgccuucgccauggagcggaacgccgggagcggcaucaucaucuccgacacccccgugcacgacugcaacacgaccugccagaccccgaagggcgccaucaacaccagccugcccuuccagaacauccaccccaucacgaucgggaagugccccaaguacgugaaguccaccaagcugcgccucgcgaccggccugcggaacgucccgagcauccagucccgcgggcuguucggcgccaucgccggguucaucgagggcggcuggaccgggaugguggacggcugguacggguaccaccaccagaacgagcagggcagcggguacgccgccgaccucaaguccacgcagaacgcgaucgacgagaucaccaacaaggugaacagcgucaucgagaagaugaacacccaguucaccgccgugggcaaggaguucaaccaccuggagaagcggaucgagaaccugaacaagaaggucgacgacggcuuccucgacaucuggacguacaacgccgagcugcuggugcuccuggagaacgagcgcacccuggacuaccacgacuccaacgugaagaaccucuacgagaagguccggagccagcugaagaacaacgccaaggagaucgggaacggcugcuucgaguucuaccacaagugcgacaacaccugcauggaguccgugaagaacgggaccuacgacuaccccaaguacagcgaggaggccaagcugaaccgcgaggagaucgacggcgugaagcucgaguccacgcggaucuaccagaucagcggcggggacaucaucaagcuccugaacgagcaggugaacaaggagaugcaguccagcaaccuguacauguccaugagcuccuggugcuacacccacagccucgacggcgccgggcuguuccuguucgaccacgccgcggaggaguacgagcacgccaagaagcucaucaucuuccugaacgagaacaacguccccgugcagcugaccuccaucagcgccccggagcacaaguucgagggccucacgcagaucuuccagaaggccuacgagcacgagcagcacaucuccgagagcaucaacaacaucguggaccacgccaucaaguccaaggaccacgcgaccuucaacuuccugcagugguacgucgccgagcagcacgaggaggaggugcuguucaaggacauccucgacaagaucgagcugaucgggaacgagaaccacggccuguaccucgccgaccaguacgugaaggggaucgccaagagccgcaaguccugaggacuagugcaucacauuuaaaagcaucucagccuaccaugagaauaagagaaagaaaaugaagaucaauagcuuauucaucucuuuuucuuuuucguugguguaaagccaacacccugucuaaaaaacauaaauuucuuuaaucauuuugccucuuuucucugugcuucaauuaauaaaaaauggaaagaaccuagaucuaaaaaaaaaaaaaaaaaaaaaaaaaaaaaaaaaaaaaaaaaaaaaaaaaaaaaaaaaaaaaaaaugcaucccccccccccccccccccccccccccccccaaaggcucuuuucagagccaccagaauu

SEQ ID NO: 1667 - protein, 530 aa, Artificial Sequence
  HA (without TM)
MKAILVVLLYTFATANADTLCIGYHANNSTDTVDTVLEKNVTVTHSVNLLEDKHNGKLCKLRGVAPLHLGKCNIAGWILGNPECESLSTASSWSYIVETSSSDNGTCYPGDFIDYEELREQLSSVSSFERFEIFPKTSSWPNHDSNKGVTAACPHAGAKSFYKNLIWLVKKGNSYPKLSKSYINDKGKEVLVLWGIHHPSTSADQQSLYQNADAYVFVGSSRYSKKFKPEIAIRPKVRDQEGRMNYYWTLVEPGDKITFEATGNLVVPRYAFAMERNAGSGIIISDTPVHDCNTTCQTPKGAINTSLPFQNIHPITIGKCPKYVKSTKLRLATGLRNVPSIQSRGLFGAIAGFIEGGWTGMVDGWYGYHHQNEQGSGYAADLKSTQNAIDEITNKVNSVIEKMNTQFTAVGKEFNHLEKRIENLNKKVDDGFLDIWTYNAELLVLLENERTLDYHDSNVKNLYEKVRSQLKNNAKEIGNGCFEFYHKCDNTCMESVKNGTYDYPKYSEEAKLNREEIDGVKLESTRIYQI

SEQ ID NO: 1668 - protein, 682 aa, Artificial Sequence
  HA (without TM)-C3d_P28
MKAILVVLLYTFATANADTLCIGYHANNSTDTVDTVLEKNVTVTHSVNLLEDKHNGKLCKLRGVAPLHLGKCNIAGWILGNPECESLSTASSWSYIVETSSSDNGTCYPGDFIDYEELREQLSSVSSFERFEIFPKTSSWPNHDSNKGVTAACPHAGAKSFYKNLIWLVKKGNSYPKLSKSYINDKGKEVLVLWGIHHPSTSADQQSLYQNADAYVFVGSSRYSKKFKPEIAIRPKVRDQEGRMNYYWTLVEPGDKITFEATGNLVVPRYAFAMERNAGSGIIISDTPVHDCNTTCQTPKGAINTSLPFQNIHPITIGKCPKYVKSTKLRLATGLRNVPSIQSRGLFGAIAGFIEGGWTGMVDGWYGYHHQNEQGSGYAADLKSTQNAIDEITNKVNSVIEKMNTQFTAVGKEFNHLEKRIENLNKKVDDGFLDIWTYNAELLVLLENERTLDYHDSNVKNLYEKVRSQLKNNAKEIGNGCFEFYHKCDNTCMESVKNGTYDYPKYSEEAKLNREEIDGVKLESTRIYQIGGGGSGGGGSKFLTTAKDKNRWEDPGKQLYNVEATSYAGGGGSGGGGSKFLTTAKDKNRWEDPGKQLYNVEATSYAGGGGSGGGGSKFLTTAKDKNRWEDPGKQLYNVEATSYAGGGGSGGGGSKFLTTAKDKNRWEDPGKQLYNVEATSYA

SEQ ID NO: 1669 - protein, 557 aa, Artificial Sequence
  HA (without TM)-foldon
MKAILVVLLYTFATANADTLCIGYHANNSTDTVDTVLEKNVTVTHSVNLLEDKHNGKLCKLRGVAPLHLGKCNIAGWILGNPECESLSTASSWSYIVETSSSDNGTCYPGDFIDYEELREQLSSVSSFERFEIFPKTSSWPNHDSNKGVTAACPHAGAKSFYKNLIWLVKKGNSYPKLSKSYINDKGKEVLVLWGIHHPSTSADQQSLYQNADAYVFVGSSRYSKKFKPEIAIRPKVRDQEGRMNYYWTLVEPGDKITFEATGNLVVPRYAFAMERNAGSGIIISDTPVHDCNTTCQTPKGAINTSLPFQNIHPITIGKCPKYVKSTKLRLATGLRNVPSIQSRGLFGAIAGFIEGGWTGMVDGWYGYHHQNEQGSGYAADLKSTQNAIDEITNKVNSVIEKMNTQFTAVGKEFNHLEKRIENLNKKVDDGFLDIWTYNAELLVLLENERTLDYHDSNVKNLYEKVRSQLKNNAKEIGNGCFEFYHKCDNTCMESVKNGTYDYPKYSEEAKLNREEIDGVKLESTRIYQIGYIPEAPRDGQAYVRKDGEWVLLSTFL

SEQ ID NO: 1670 - protein, 696 aa, Artificial Sequence
  HA (without TM)-SGG-ferritin
MKAILVVLLYTFATANADTLCIGYHANNSTDTVDTVLEKNVTVTHSVNLLEDKHNGKLCKLRGVAPLHLGKCNIAGWILGNPECESLSTASSWSYIVETSSSDNGTCYPGDFIDYEELREQLSSVSSFERFEIFPKTSSWPNHDSNKGVTAACPHAGAKSFYKNLIWLVKKGNSYPKLSKSYINDKGKEVLVLWGIHHPSTSADQQSLYQNADAYVFVGSSRYSKKFKPEIAIRPKVRDQEGRMNYYWTLVEPGDKITFEATGNLVVPRYAFAMERNAGSGIIISDTPVHDCNTTCQTPKGAINTSLPFQNIHPITIGKCPKYVKSTKLRLATGLRNVPSIQSRGLFGAIAGFIEGGWTGMVDGWYGYHHQNEQGSGYAADLKSTQNAIDEITNKVNSVIEKMNTQFTAVGKEFNHLEKRIENLNKKVDDGFLDIWTYNAELLVLLENERTLDYHDSNVKNLYEKVRSQLKNNAKEIGNGCFEFYHKCDNTCMESVKNGTYDYPKYSEEAKLNREEIDGVKLESTRIYQISGGDIIKLLNEQVNKEMQSSNLYMSMSSWCYTHSLDGAGLFLFDHAAEEYEHAKKLIIFLNENNVPVQLTSISAPEHKFEGLTQIFQKAYEHEQHISESINNIVDHAIKSKDHATFNFLQWYVAEQHEEEVLFKDILDKIELIGNENHGLYLADQYVKGIAKSRKS

SEQ ID NO: 1671 - protein, 25 aa, Artificial Sequence
  homo-amino acid polymer (HAP), HAPylation
GGGGSGGGGSGGGGSGGGGSGGGGS

SEQ ID NO: 1672 - protein, 468 aa, Artificial Sequence
  human serum albumin
MKWVTFISLLFLFSSAYSRGVFRRDAHKSEVAHRFKDLGEENFKALVLIAFAQYLQQCPFEDHVKLVNEVDEGKASSAKQRLKCASLQKFGERAFKAWAVARLSQRFPKAEFAEVSKLVTDLTKVHTECCHGDLLECADDRADLAKYICENQDSISSKLKECCEKPLLEKSHCIAEVENDEMPADLPSLAADFVESKDVCKNYAEAKDVFLGMFLYEYARRHPDYSVVLLLRLAKTYETTLEKCCAAADPHECYAKVFDEFKPLVEEPQNLIKQNCELFEQLGEYKFQNALLVRYTKKVPQVSTPTLVEVSRNLGKVGSKCCNPEAKRMPCAEDYLSVVLNQLCVLHEKTPVSDRVTKCCTESLVNRRPCFSALEVDETYVPKEFNAETFTFHADICTLSEKERQIKKQTALVELVKHKPKATKEQLKAVMDDFAAFVEKCCKADDKETCFAEEGKKLVAASQAALGL

SEQ ID NO: 1673 - protein, 218 aa, Artificial Sequence
  Fc portion of hs Igs
PAPEFLGGPSVFLFPPKPKDTLMISRTPEVTCVVVDVSQEDPEVQFNWYVDGVEVHNAKTKPREEQFNSTYRVVSVLTVLHQDWLNGKEYKCKVSNKGLPSSIEKTISKAKGQPREPQVYTLPPSQEEMTKNQVSLTCLVKGFYPSDIAVEWESNGQPENNYKTTPPVLDSDGSFFLYSRLTVDKSRWQEGNVFSCSVMHEALHNHYTQKSLSLSLGK

SEQ ID NO: 1674 - protein, 52 aa, Artificial Sequence
  gi|924443137|pdb|2N35|A Chain A,
GTIDEWLLKEAKEKAIEELKKAGITSDYYFDLINKAKTVEGVNALKDEILKA

SEQ ID NO: 1675 - protein, 65 aa, Artificial Sequence
  gi|727352810|emb|CEJ98611.1| protein G albumin binding domain [synthetic construct]
MGCSSHEHEHEDEAVDANSLAAAKETALYHLDRLGVADAYKDLIDKAKTVEGVKARYFEILHALP

SEQ ID NO: 1676 - protein, 49 aa, Artificial Sequence
  gi|30577267|emb|CAD91093.1| unnamed protein product, partial [synthetic construct]
PASLAEAKVLANRELDKYGVSDYYKNLINNAKTVEGVKALIDEILAALP

SEQ ID NO: 1677 - protein, 28 aa, Artificial Sequence
  Poly-glycine element
GGGGGGGGGGGGGGGGGGGGGGGGGGGG

SEQ ID NO: 1678 - protein, 617 aa, Artificial Sequence
  gi|525314504|ref|NP_001265847.1| elastin isoform l precursor [Homo sapiens]
MAGLTAAAPRPGVLLLLLSILHPSRPGGVPGAIPGGVPGGVFYPALGPGGKPLKPVPGGLAGAGLGAGLGAFPAVTFPGALVPGGVADAAAAYKAAKAGAGLGGVPGVGGLGVSAGAVVPQPGAGVKPGKVPGVGLPGVYPGGVLPGVGPFGGPQPGVPLGYPIKAPKLPGGYGLPYTTGKLPYGYGPGGVAGAAGKAGYPTGTGVGPQAAAAAAAKAAAKFGAGAAGVLPGVGGAGVPGVPGAIPGIGGIAGVGTPAAAAAAAAAAKAAKYGAAAGLVPGGPGFGPGVVGVPGAGVPGVGVPGAGIPVVPGAGIPGAAVPGVVSPEAAAKAAAKAAKYGARPGVGVGGIPTYGVGAGGFPGFGVGVGAEAQAAAAAKAAKYGLVPGVGVAPGVGVAPGVGVAPGVGLAPGVGVAPGVGVAPGVGVAPGIGPGGVAAAAKSAAKVAAKAQLRAAAGLGAGIPGLGVGVGVPGLGVGAGVPGLGVGAGVPGFGAVPGALAAAKAAKYGAAVPGVLGGLGALGGVGIPGGVVGAGPAAAAAAAKAAAKAAQFGLVGAAGLGGLGVGGLGVPGVGGLGGIPPAAAAKAAKYGVAARPGFGLSPIFPGGACLGKACGRKRK

SEQ ID NO: 1679 - protein, 490 aa, Artificial Sequence
  gi|553788|gb|AAA61141.1| transferrin, partial [Homo sapiens]
ANEADAVTLDAGLVYDAYLAPNNLKPVVAEFYGSKEDPQTFYYAVAVVKKDSGFQMNQLRGKKSCHTGLGRSAGWNIPIGLLYCDLPEPRKPLEKAVANFFSGSCAPCADGTDFPQLCQLCPGCGCSTLNQYFGYSGAFKCLKDGAGDVAFVKHSTIFENLANKADRDQYELLCLDNTRKPVDEYKDCHLAQVPSHTVVARSMGGKEDLIWELLNQAQEHFGKDKSKEFQLFSSPHGKDLLFKDSAHGFLKVPPRMNAKMYLGYEYVTAIRNLREGTCPEAPTDECKPVKWCALSHHERLKCDEWSVNSVGKIECVSAETTEDCIAKIMNGEADAMSLDGGFVYIAGKCGLVPVLAENYNKSDNCEDTPEAGYFAVAVVKKSASDLTWDNLKGKKSCHTAVGRTAGWNIPMGLLYNKINHCRFDEFFSEGCAPGSKKDSSLCKLCMGSGLNLCEPNNKEGYYGYTGAFRCLVEKGDVAFVKHQTVPQNTG

SEQ ID NO: 1680 - protein, 15 aa, Artificial Sequence
  proline-alanine-serine polymer (PAS PASylation
PASPASPASPASPAS

SEQ ID NO: 1681 - protein, 30 aa, Artificial Sequence
  31 aa stretch of a HCG -subunit (HCG-) (CTP)
FQSSSSKAPPPSLPSPSRLPGPSDTPILPQ

SEQ ID NO: 1682 - protein, 289 aa, Artificial Sequence
  XTEN-2
GEGSGEGSEGEGSEGSGEGEGSEGSGEGEGGSEGSEGEGGSEGSEGEGGSEGSEGEGSGEGSEGEGGSEGSEGEGSGEGSEGEGSEGGSEGEGGSEGSEGEGSGEGSEGEGGEGGSEGEGSEGSGEGEGSGEGSEGEGSEGSGEGEGSGEGSEGEGSEGSGEGEGSEGSGEGEGGSEGSEGEGSEGSGEGEGGEGSGEGEGSGEGSEGEGGGEGSEGEGSGEGGEGEGSEGGSEGEGGSEGGEGEGSEGSGEGEGSEGGSEGEGSEGGSEGEGSEGSGEGEGSEGSGEG

SEQ ID NO: 1683 - protein, 145 aa, Artificial Sequence
  XTEN-3
GEGGSEGSEGEGSEGSGEGEGGSEGSEGEGSEGSGEGEGGSEGSEGEGGSEGSEGEGGEGSGEGEGSEGSGEGEGSGEGSEGEGGSEGGEGEGSEGGSEGEGSEGGSEGEGGEGSGEGEGGGEGSEGEGSEGSGEGEGSGEGSEG

SEQ ID NO: 1684 - protein, 73 aa, Artificial Sequence
  XTEN-4
GEGSGEGSEGEGSEGSGEGEGSEGSGEGEGGSEGSEGEGGSEGSEGEGSEGGSEGEGGSEGSEGEGSEGGGEG

SEQ ID NO: 1685 - protein, 37 aa, Artificial Sequence
  XTEN-5
GEGSGEGSEGEGSEGSGEGEGSEGGSEGEGGSEGSEG

SEQ ID NO: 1686 - protein, 145 aa, Artificial Sequence
  XTEN-5
GTSTPESGSASPGTSPSGESSTAPGTSPSGESSTAPGSTSSTAESPGPGSTSESPSGTAPGSTSSTAESPGPGTSPSGESSTAPGTSTPESGSASPGSTSSTAESPGPGTSPSGESSTAPGTSPSGESSTAPGTSPSGESSTAPG

SEQ ID NO: 1687 - protein, 30 aa, Artificial Sequence
  ELPylation-1
  misc_feature (4)..(4): Xaa can be any naturally occurring amino acid
  misc_feature (9)..(9): Xaa can be any naturally occurring amino acid
  misc_feature (14)..(14): Xaa can be any naturally occurring amino acid
  misc_feature (19)..(19): Xaa can be any naturally occurring amino acid
  misc_feature (24)..(24): Xaa can be any naturally occurring amino acid
  misc_feature (29)..(29): Xaa can be any naturally occurring amino acid
VPGXGVPGXGVPGXGVPGXGVPGXGVPGXG

SEQ ID NO: 1688 - protein, 20 aa, Artificial Sequence
  ELPylation-2
  misc_feature (4)..(4): Xaa can be any naturally occurring amino acid
  misc_feature (9)..(9): Xaa can be any naturally occurring amino acid
  misc_feature (14)..(14): Xaa can be any naturally occurring amino acid
  misc_feature (19)..(19): Xaa can be any naturally occurring amino acid
VPGXGVPGXGVPGXGVPGXG

SEQ ID NO: 1689 - protein, 15 aa, Artificial Sequence
  ELPylation-3
  misc_feature (4)..(4): Xaa can be any naturally occurring amino acid
  misc_feature (9)..(9): Xaa can be any naturally occurring amino acid
  misc_feature (14)..(14): Xaa can be any naturally occurring amino acid
VPGXGVPGXGVPGXG

SEQ ID NO: 1690 - protein, 35 aa, Artificial Sequence
  ELPylation-4
  misc_feature (4)..(4): Xaa can be any naturally occurring amino acid
  misc_feature (9)..(9): Xaa can be any naturally occurring amino acid
  misc_feature (14)..(14): Xaa can be any naturally occurring amino acid
  misc_feature (19)..(19): Xaa can be any naturally occurring amino acid
  misc_feature (24)..(24): Xaa can be any naturally occurring amino acid
  misc_feature (29)..(29): Xaa can be any naturally occurring amino acid
  misc_feature (34)..(34): Xaa can be any naturally occurring amino acid
VPGXGVPGXGVPGXGVPGXGVPGXGVPGXGVPGXG

SEQ ID NO: 1691 - protein, 116 aa, Artificial Sequence
  gelatin-like protein polymer
GPPGEQGKPGNQGEPGNPGSPGQPGNPGQPGSPGNPGQPGNEGPQGSQGNPGQPGEPGSNGQPGQPGQNGKNGQPGSPGSQGSPGNQGSPGNQGQPGNKGEQGKPGNQGPAGGSGG

SEQ ID NO: 1692 - protein, 28 aa, Artificial Sequence
  29 aa stretch of a HCG -subunit (HCG-) (CgB)
SSSSKAPPPSLPSPSRLPGPSDTPILPQ

SEQ ID NO: 1693 - protein, 288 aa, Artificial Sequence
  XTEN288 (Xten)
GTSESATPESGPGSEPATSGSETPGTSESATPESGPGSEPATSGSETPGTSESATPESGPGTSTEPSEGSAPGSPAGSPTSTEEGTSESATPESGPGSEPATSGSETPGTSESATPESGPGSPAGSPTSTEEGSPAGSPTSTEEGTSTEPSEGSAPGTSESATPESGPGTSESATPESGPGTSESATPESGPGSEPATSGSETPGSEPATSGSETPGSPAGSPTSTEEGTSTEPSEGSAPGTSTEPSEGSAPGSEPATSGSETPGTSESATPESGPGTSTEPSEGSAP

SEQ ID NO: 1694 - protein, 601 aa, Artificial Sequence
  PAS600
ASPAAPAPASPAAPAPSAPAASPAAPAPASPAAPAPSAPAASPAAPAPASPAAPAPSAPAASPAAPAPASPAAPAPSAPAASPAAPAPASPAAPAPSAPAASPAAPAPASPAAPAPSAPAASPAAPAPASPAAPAPSAPAASPAAPAPASPAAPAPSAPAASPAAPAPASPAAPAPSAPAASPAAPAPASPAAPAPSAPAASPAAPAPASPAAPAPSAPAASPAAPAPASPAAPAPSAPAASPAAPAPASPAAPAPSAPAASPAAPAPASPAAPAPSAPAASPAAPAPASPAAPAPSAPAASPAAPAPASPAAPAPSAPAASPAAPAPASPAAPAPSAPAASPAAPAPASPAAPAPSAPAASPAAPAPASPAAPAPSAPAASPAAPAPASPAAPAPSAPAASPAAPAPASPAAPAPSAPAASPAAPAPASPAAPAPSAPAASPAAPAPASPAAPAPSAPAASPAAPAPASPAAPAPSAPAASPAAPAPASPAAPAPSAPAASPAAPAPASPAAPAPSAPAASPAAPAPASPAAPAPSAPAASPAAPAPASPAAPAPSAPAASPAAPAPASPAAPAPSAPAASPAAPAPASPAAPAPSAPAA

SEQ ID NO: 1695 - protein, 201 aa, Artificial Sequence
  PAS200
ASPAAPAPASPAAPAPSAPAASPAAPAPASPAAPAPSAPAASPAAPAPASPAAPAPSAPAASPAAPAPASPAAPAPSAPAASPAAPAPASPAAPAPSAPAASPAAPAPASPAAPAPSAPAASPAAPAPASPAAPAPSAPAASPAAPAPASPAAPAPSAPAASPAAPAPASPAAPAPSAPAASPAAPAPASPAAPAPSAPAA

SEQ ID NO: 1696 - protein, 200 aa, Artificial Sequence
  Homo Aminoacid Polymer (HAP200)
GGGGSGGGGSGGGGSGGGGSGGGGSGGGGSGGGGSGGGGSGGGGSGGGGSGGGGSGGGGSGGGGSGGGGSGGGGSGGGGSGGGGSGGGGSGGGGSGGGGSGGGGSGGGGSGGGGSGGGGSGGGGSGGGGSGGGGSGGGGSGGGGSGGGGSGGGGSGGGGSGGGGSGGGGSGGGGSGGGGSGGGGSGGGGSGGGGSGGGGS

SEQ ID NO: 1697 - protein, 200 aa, Artificial Sequence
  Elastin-like-Polymer (ELP)
VGVPGVGVPGVGVPGVGVPGVGVPGVGVPGVGVPGVGVPGVGVPGVGVPGVGVPGVGVPGVGVPGVGVPGVGVPGVGVPGVGVPGVGVPGVGVPGVGVPGVGVPGVGVPGVGVPGVGVPGVGVPGVGVPGVGVPGVGVPGVGVPGVGVPGVGVPGVGVPGVGVPGVGVPGVGVPGVGVPGVGVPGVGVPGVGVPGVGVPG

SEQ ID NO: 1698 - protein, 608 aa, Artificial Sequence
  Mus musculus Serum Albumin (MmAlb)
MKWVTFLLLLFVSGSAFSRGVFRREAHKSEIAHRYNDLGEQHFKGLVLIAFSQYLQKCSYDEHAKLVQEVTDFAKTCVADESAANCDKSLHTLFGDKLCAIPNLRENYGELADCCTKQEPERNECFLQHKDDNPSLPPFERPEAEAMCTSFKENPTTFMGHYLHEVARRHPYFYAPELLYYAEQYNEILTQCCAEADKESCLTPKLDGVKEKALVSSVRQRMKCSSMQKFGERAFKAWAVARLSQTFPNADFAEITKLATDLTKVNKECCHGDLLECADDRAELAKYMCENQATISSKLQTCCDKPLLKKAHCLSEVEHDTMPADLPAIAADFVEDQEVCKNYAEAKDVFLGTFLYEYSRRHPDYSVSLLLRLAKKYEATLEKCCAEANPPACYGTVLAEFQPLVEEPKNLVKTNCDLYEKLGEYGFQNAILVRYTQKAPQVSTPTLVEAARNLGRVGTKCCTLPEDQRLPCVEDYLSAILNRVCLLHEKTPVSEHVTKCCSGSLVERRPCFSALTVDETYVPKEFKAETFTFHSDICTLPEKEKQIKKQTALAELVKHKPKATAEQLKTVMDDFAQFLDTCCKAADKDTCFSTEGPNLVTRCKDALA

SEQ ID NO: 1699 - protein, 584 aa, Artificial Sequence
  Mus musculus Serum Albumin without signal peptide(25-608)
EAHKSEIAHRYNDLGEQHFKGLVLIAFSQYLQKCSYDEHAKLVQEVTDFAKTCVADESAANCDKSLHTLFGDKLCAIPNLRENYGELADCCTKQEPERNECFLQHKDDNPSLPPFERPEAEAMCTSFKENPTTFMGHYLHEVARRHPYFYAPELLYYAEQYNEILTQCCAEADKESCLTPKLDGVKEKALVSSVRQRMKCSSMQKFGERAFKAWAVARLSQTFPNADFAEITKLATDLTKVNKECCHGDLLECADDRAELAKYMCENQATISSKLQTCCDKPLLKKAHCLSEVEHDTMPADLPAIAADFVEDQEVCKNYAEAKDVFLGTFLYEYSRRHPDYSVSLLLRLAKKYEATLEKCCAEANPPACYGTVLAEFQPLVEEPKNLVKTNCDLYEKLGEYGFQNAILVRYTQKAPQVSTPTLVEAARNLGRVGTKCCTLPEDQRLPCVEDYLSAILNRVCLLHEKTPVSEHVTKCCSGSLVERRPCFSALTVDETYVPKEFKAETFTFHSDICTLPEKEKQIKKQTALAELVKHKPKATAEQLKTVMDDFAQFLDTCCKAADKDTCFSTEGPNLVTRCKDALA

SEQ ID NO: 1700 - protein, 609 aa, Artificial Sequence [sequence omitted]

SEQ ID NO: 1701 - protein, 585 aa, Artificial Sequence [sequence omitted]

SEQ ID NO: 1702 - protein, 585 aa, Artificial Sequence
  Homo sapiens serum albumin without signal peptide HsAlb(25-609_K597P)
DAHKSEVAHRFKDLGEENFKALVLIAFAQYLQQCPFEDHVKLVNEVTEFAKTCVADESAENCDKSLHTLFGDKLCTVATLRETYGEMADCCAKQEPERNECFLQHKDDNPNLPRLVRPEVDVMCTAFHDNEETFLKKYLYEIARRHPYFYAPELLFFAKRYKAAFTECCQAADKAACLLPKLDELRDEGKASSAKQRLKCASLQKFGERAFKAWAVARLSQRFPKAEFAEVSKLVTDLTKVHTECCHGDLLECADDRADLAKYICENQDSISSKLKECCEKPLLEKSHCIAEVENDEMPADLPSLAADFVESKDVCKNYAEAKDVFLGMFLYEYARRHPDYSVVLLLRLAKTYETTLEKCCAAADPHECYAKVFDEFKPLVEEPQNLIKQNCELFEQLGEYKFQNALLVRYTKKVPQVSTPTLVEVSRNLGKVGSKCCKHPEAKRMPCAEDYLSVVLNQLCVLHEKTPVSDRVTKCCTESLVNRRPCFSALEVDETYVPKEFNAETFTFHADICTLSEKERQIKKQTALVELVKHKPKATKEQLKAVMDDFAAFVEKCCKADDKETCFAEEGPKLVAASQAALGL

SEQ ID NO: 1703 - protein, 205 aa, Artificial Sequence
  Mm Alb dom III (MmAlb 404-608)
LVEEPKNLVKTNCDLYEKLGEYGFQNAILVRYTQKAPQVSTPTLVEAARNLGRVGTKCCTLPEDQRLPCVEDYLSAILNRVCLLHEKTPVSEHVTKCCSGSLVERRPCFSALTVDETYVPKEFKAETFTFHSDICTLPEKEKQIKKQTALAELVKHKPKATAEQLKTVMDDFAQFLDTCCKAADKDTCFSTEGPNLVTRCKDALA

SEQ ID NO: 1704 - protein, 18 aa, Artificial Sequence
  Albumin Binding Peptide SA 21 (ABP-SA21)
RLIEDICLPRWGCLWEDD

SEQ ID NO: 1705 - protein, 46 aa, Artificial Sequence
  Albumin Binding Domain Staph sp Protein G high (ABD_SpG_high)
LAEAKVLANRELDKYGVSDFYKRLINKAKTVEGVEALKLHILAALP

SEQ ID NO: 1706 - protein, 227 aa, Artificial Sequence; identical to SEQ ID NO: 1117
  Human IgG1 constant region (HC2, HC3) HsIgG1

SEQ ID NO: 1707 - protein, 222 aa, Artificial Sequence
  Mouse IgG1 constant region (HC2, HC3 MmIgG1
GCKPCICTVPEVSSVFIFPPKPKDVLTITLTPKVTCVVVDISKDDPEVQFSWFVDDVEVHTAQTQPREEQFNSTFRSVSELPIMHQDWLNGKEFKCRVNSAAFPAPIEKTISKTKGRPKAPQVYTIPPPKEQMAKDKVSLTCMITDFFPEDITVEWQWNGQPAENYKNTQPIMDTDGSYFVYSKLNVQKSNWEAGNTFTCSVLHEGLHNHHTEKSLSHSPGK

SEQ ID NO: 1708 - protein, 232 aa, Artificial Sequence; identical to SEQ ID NO: 1119
  Mouse IgG2a constant region (HC2,HC3) MmIgG2

SEQ ID NO: 1709 - protein, 697 aa, Artificial Sequence
  Mouse Transferrin (MmTf) full length
MRLTVGALLACAALGLCLAVPDKTVKWCAVSEHENTKCISFRDHMKTVLPPDGPRLACVKKTSYPDCIKAISASEADAMTLDGGWVYDAGLTPNNLKPVAAEFYGSVEHPQTYYYAVAVVKKGTDFQLNQLEGKKSCHTGLGRSAGWVIPIGLLFCKLSEPRSPLEKAVSSFFSGSCVPCADPVAFPKLCQLCPGCGCSSTQPFFGYVGAFKCLKDGGGDVAFVKHTTIFEVLPEKADRDQYELLCLDNTRKPVDQYEDCYLARIPSHAVVARKNNGKEDLIWEILKVAQEHFGKGKSKDFQLFSSPLGKDLLFKDSAFGLLRVPPRMDYRLYLGHNYVTAIRNQQEGVCPEGSIDNSPVKWCALSHLERTKCDEWSIISEGKIECESAETTEDCIEKIVNGEADAMTLDGGHAYIAGQCGLVPVMAEYYESSNCAIPSQQGIFPKGYYAVAVVKASDTSITWNNLKGKKSCHTGVDRTAGWNIPMGMLYNRINHCKFDEFFSQGCAPGYEKNSTLCDLCIGPLKCAPNNKEEYNGYTGAFRCLVEKGDVAFVKHQTVLDNTEGKNPAEWAKNLKQEDFELLCPDGTRKPVKDFASCHLAQAPNHVVVSRKEKAARVKAVLTSQETLFGGSDCTGNFCLFKSTTKDLLFRDDTKCFVKLPEGTTPEKYLGAEYMQSVGNMRKCSTSRLLEACTFHKH

SEQ ID NO: 1710 - protein, 678 aa, Artificial Sequence
  Mouse Transferrin without signal peptide (MmTf 20-697)
VPDKTVKWCAVSEHENTKCISFRDHMKTVLPPDGPRLACVKKTSYPDCIKAISASEADAMTLDGGWVYDAGLTPNNLKPVAAEFYGSVEHPQTYYYAVAVVKKGTDFQLNQLEGKKSCHTGLGRSAGWVIPIGLLFCKLSEPRSPLEKAVSSFFSGSCVPCADPVAFPKLCQLCPGCGCSSTQPFFGYVGAFKCLKDGGGDVAFVKHTTIFEVLPEKADRDQYELLCLDNTRKPVDQYEDCYLARIPSHAVVARKNNGKEDLIWEILKVAQEHFGKGKSKDFQLFSSPLGKDLLFKDSAFGLLRVPPRMDYRLYLGHNYVTAIRNQQEGVCPEGSIDNSPVKWCALSHLERTKCDEWSIISEGKIECESAETTEDCIEKIVNGEADAMTLDGGHAYIAGQCGLVPVMAEYYESSNCAIPSQQGIFPKGYYAVAVVKASDTSITWNNLKGKKSCHTGVDRTAGWNIPMGMLYNRINHCKFDEFFSQGCAPGYEKNSTLCDLCIGPLKCAPNNKEEYNGYTGAFRCLVEKGDVAFVKHQTVLDNTEGKNPAEWAKNLKQEDFELLCPDGTRKPVKDFASCHLAQAPNHVVVSRKEKAARVKAVLTSQETLFGGSDCTGNFCLFKSTTKDLLFRDDTKCFVKLPEGTTPEKYLGAEYMQSVGNMRKCSTSRLLEACTFHKH

SEQ ID NO: 1711 - protein, 698 aa, Artificial Sequence
  human transferrin full length (HsTf)
MRLAVGALLVCAVLGLCLAVPDKTVRWCAVSEHEATKCQSFRDHMKSVIPSDGPSVACVKKASYLDCIRAIAANEADAVTLDAGLVYDAYLAPNNLKPVVAEFYGSKEDPQTFYYAVAVVKKDSGFQMNQLRGKKSCHTGLGRSAGWNIPIGLLYCDLPEPRKPLEKAVANFFSGSCAPCADGTDFPQLCQLCPGCGCSTLNQYFGYSGAFKCLKDGAGDVAFVKHSTIFENLANKADRDQYELLCLDNTRKPVDEYKDCHLAQVPSHTVVARSMGGKEDLIWELLNQAQEHFGKDKSKEFQLFSSPHGKDLLFKDSAHGFLKVPPRMDAKMYLGYEYVTAIRNLREGTCPEAPTDECKPVKWCALSHHERLKCDEWSVNSVGKIECVSAETTEDCIAKIMNGEADAMSLDGGFVYIAGKCGLVPVLAENYNKSDNCEDTPEAGYFAIAVVKKSASDLTWDNLKGKKSCHTAVGRTAGWNIPMGLLYNKINHCRFDEFFSEGCAPGSKKDSSLCKLCMGSGLNLCEPNNKEGYYGYTGAFRCLVEKGDVAFVKHQTVPQNTGGKNPDPWAKNLNEKDYELLCLDGTRKPVEEYANCHLARAPNHAVVTRKDKEACVHKILRQQQHLFGSNVTDCSGNFCLFRSETKDLLFRDDTVCLAKLHDRNTYEKYLGEEYVKAVGNLRKCSTSSLLEACTFRRP

SEQ ID NO: 1712 - protein, 679 aa, Artificial Sequence
  human transferrin full length (HsTf 20-698)
VPDKTVRWCAVSEHEATKCQSFRDHMKSVIPSDGPSVACVKKASYLDCIRAIAANEADAVTLDAGLVYDAYLAPNNLKPVVAEFYGSKEDPQTFYYAVAVVKKDSGFQMNQLRGKKSCHTGLGRSAGWNIPIGLLYCDLPEPRKPLEKAVANFFSGSCAPCADGTDFPQLCQLCPGCGCSTLNQYFGYSGAFKCLKDGAGDVAFVKHSTIFENLANKADRDQYELLCLDNTRKPVDEYKDCHLAQVPSHTVVARSMGGKEDLIWELLNQAQEHFGKDKSKEFQLFSSPHGKDLLFKDSAHGFLKVPPRMDAKMYLGYEYVTAIRNLREGTCPEAPTDECKPVKWCALSHHERLKCDEWSVNSVGKIECVSAETTEDCIAKIMNGEADAMSLDGGFVYIAGKCGLVPVLAENYNKSDNCEDTPEAGYFAIAVVKKSASDLTWDNLKGKKSCHTAVGRTAGWNIPMGLLYNKINHCRFDEFFSEGCAPGSKKDSSLCKLCMGSGLNLCEPNNKEGYYGYTGAFRCLVEKGDVAFVKHQTVPQNTGGKNPDPWAKNLNEKDYELLCLDGTRKPVEEYANCHLARAPNHAVVTRKDKEACVHKILRQQQHLFGSNVTDCSGNFCLFRSETKDLLFRDDTVCLAKLHDRNTYEKYLGEEYVKAVGNLRKCSTSSLLEACTFRRP

SEQ ID NO: 1713 - protein, 59 aa, Artificial Sequence
  Ig binding domain Staph prot A (Sa_SpA)
ADNKFNKEQQNAFYEILHLPNLNEEQRNGFIQSLKDDPSQSANLLAEAKKLNDAQAPKA

SEQ ID NO: 1714 - protein, 227 aa, Artificial Sequence
  Monomeric Fc portion (Hs_monoIgG1)
DKTHTSPPSPAPELLGGPSVFLFPPKPKDTLMISRTPEVTCVVVDVSHEDPEVKFNWYVDGVEVHNAKTKPREEQYNSTYRVVSVLTVLHQDWLNGKEYKCKVSNKALPAPIEKTISKAKGQPREPQVYTLPPSREEMTKNQVNLTCLVKGFYPSDIAVEWESNGQPENNYKTTPPVLDSDGSFFLNSTLTVDKSRWQQGNVFSCSVMHEALHNHYTQKSLSLSPGK

SEQ ID NO: 1715 - protein, 454 aa, Artificial Sequence
  2x Monomeric Fc portion (Hs_2xmonoIgG1)
DKTHTSPPSPAPELLGGPSVFLFPPKPKDTLMISRTPEVTCVVVDVSHEDPEVKFNWYVDGVEVHNAKTKPREEQYNSTYRVVSVLTVLHQDWLNGKEYKCKVSNKALPAPIEKTISKAKGQPREPQVYTLPPSREEMTKNQVNLTCLVKGFYPSDIAVEWESNGQPENNYKTTPPVLDSDGSFFLNSTLTVDKSRWQQGNVFSCSVMHEALHNHYTQKSLSLSPGKDKTHTSPPSPAPELLGGPSVFLFPPKPKDTLMISRTPEVTCVVVDVSHEDPEVKFNWYVDGVEVHNAKTKPREEQYNSTYRVVSVLTVLHQDWLNGKEYKCKVSNKALPAPIEKTISKAKGQPREPQVYTLPPSREEMTKNQVNLTCLVKGFYPSDIAVEWESNGQPENNYKTTPPVLDSDGSFFLNSTLTVDKSRWQQGNVFSCSVMHEALHNHYTQKSLSLSPGK

SEQ ID NO: 1716 - protein, 58 aa, Artificial Sequence
  Ig binding domain affibody (IgBD)
VDAKYAKEQDAAAHEIRWLPNLTFDQRVAFIHKLADDPSQSSELLSEAKKLNDSQAPK

SEQ ID NO: 1717 - protein, 13 aa, Artificial Sequence
  Ig binding peptide (IgBP)
DCAWHLGELVWCT

SEQ ID NO: 1718 - protein, 905 aa, Artificial Sequence
  E-XTEN
HGEGTFTSDLSKQMEEEAVRLFIEWLKNGGPSSGAPPPSGGSPAGSPTSTEEGTSESATPESGPGTSTEPSEGSAPGSPAGSPTSTEEGTSTEPSEGSAPGTSTEPSEGSAPGTSESATPESGPGSEPATSGSETPGSEPATSGSETPGSPAGSPTSTEEGTSESATPESGPGTSTEPSEGSAPGTSTEPSEGSAPGSPAGSPTSTEEGTSTEPSEGSAPGTSTEPSEGSAPGTSESATPESGPGTSTEPSEGSAPGTSESATPESGPGSEPATSGSETPGTSTEPSEGSAPGTSTEPSEGSAPGTSESATPESGPGTSESATPESGPGSPAGSPTSTEEGTSESATPESGPGSEPATSGSETPGTSESATPESGPGTSTEPSEGSAPGTSTEPSEGSAPGTSTEPSEGSAPGTSTEPSEGSAPGTSTEPSEGSAPGTSTEPSEGSAPGSPAGSPTSTEEGTSTEPSEGSAPGTSESATPESGPGSEPATSGSETPGTSESATPESGPGSEPATSGSETPGTSESATPESGPGTSTEPSEGSAPGTSESATPESGPGSPAGSPTSTEEGSPAGSPTSTEEGSPAGSPTSTEEGTSESATPESGPGTSTEPSEGSAPGTSESATPESGPGSEPATSGSETPGTSESATPESGPGSEPATSGSETPGTSESATPESGPGTSTEPSEGSAPGSPAGSPTSTEEGTSESATPESGPGSEPATSGSETPGTSESATPESGPGSPAGSPTSTEEGSPAGSPTSTEEGTSTEPSEGSAPGTSESATPESGPGTSESATPESGPGTSESATPESGPGSEPATSGSETPGSEPATSGSETPGSPAGSPTSTEEGTSTEPSEGSAPGTSTEPSEGSAPGSEPATSGSETPGTSESATPESGPGTSTEPSEGSAPG

SEQ ID NO: 1719 - protein, 420 aa, Artificial Sequence
  Elastin-like polymer ELP(420)
VGVPGVGVPGVGVPGVGVPGVGVPGVGVPGVGVPGVGVPGVGVPGVGVPGVGVPGVGVPGVGVPGVGVPGVGVPGVGVPGVGVPGVGVPGVGVPGVGVPGVGVPGVGVPGVGVPGVGVPGVGVPGVGVPGVGVPGVGVPGVGVPGVGVPGVGVPGVGVPGVGVPGVGVPGVGVPGVGVPGVGVPGVGVPGVGVPGVGVPGVGVPGVGVPGVGVPGVGVPGVGVPGVGVPGVGVPGVGVPGVGVPGVGVPGVGVPGVGVPGVGVPGVGVPGVGVPGVGVPGVGVPGVGVPGVGVPGVGVPGVGVPGVGVPGVGVPGVGVPGVGVPGVGVPGVGVPGVGVPGVGVPGVGVPGVGVPGVGVPGVGVPGVGVPGVGVPGVGVPGVGVPGVGVPGVGVPGVGVPGVGVPGVGVPGVGVPGVGVPG

SEQ ID NO: 1720 - protein, 20 aa, Artificial Sequence
  Albumin Binding Peptide SA 15 ABP SA15
GEWWEDICLPRWGCLWEEED

SEQ ID NO: 1721 - protein, 46 aa, Artificial Sequence
  Albumin Binding Domain Staph sp Protein G| ABD SPG
LAEAKVLANRELDKYGVSDYYKNLINNAKTVEGVKALIDEILAALP

SEQ ID NO: 1722 - protein, 206 aa, Artificial Sequence
  Human Albumin Domain III (HsAlbDIII (404-609))
LVEEPQNLIKQNCELFEQLGEYKFQNALLVRYTKKVPQVSTPTLVEVSRNLGKVGSKCCKHPEAKRMPCAEDYLSVVLNQLCVLHEKTPVSDRVTKCCTESLVNRRPCFSALEVDETYVPKEFNAETFTFHADICTLSEKERQIKKQTALVELVKHKPKATKEQLKAVMDDFAAFVEKCCKADDKETCFAEEGKKLVAASQAALGL

SEQ ID NO: 1723 - protein, 222 aa, Artificial Sequence
  monomeric Mm Fc
GSKPSISTVPEVSSVFIFPPKPKDVLTITLTPKVTCVVVDISKDDPEVQFSWFVDDVEVHTAQTQPREEQFNSTFRSVSELPIMHQDWLNGKEFKCRVNSAAFPAPIEKTISKTKGRPKAPQVYTIPPPKEQMAKDKVNLTCMITDFFPEDITVEWQWNGQPAENYKNTQPIMDTDGSYFVNSTLNVQKSNWEAGNTFTCSVLHEGLHNHHTEKSLSHSPGK

SEQ ID NO: 1724 - protein, 444 aa, Artificial Sequence
  tandem monomeric MmFc
GSKPSISTVPEVSSVFIFPPKPKDVLTITLTPKVTCVVVDISKDDPEVQFSWFVDDVEVHTAQTQPREEQFNSTFRSVSELPIMHQDWLNGKEFKCRVNSAAFPAPIEKTISKTKGRPKAPQVYTIPPPKEQMAKDKVNLTCMITDFFPEDITVEWQWNGQPAENYKNTQPIMDTDGSYFVNSTLNVQKSNWEAGNTFTCSVLHEGLHNHHTEKSLSHSPGKGSKPSISTVPEVSSVFIFPPKPKDVLTITLTPKVTCVVVDISKDDPEVQFSWFVDDVEVHTAQTQPREEQFNSTFRSVSELPIMHQDWLNGKEFKCRVNSAAFPAPIEKTISKTKGRPKAPQVYTIPPPKEQMAKDKVNLTCMITDFFPEDITVEWQWNGQPAENYKNTQPIMDTDGSYFVNSTLNVQKSNWEAGNTFTCSVLHEGLHNHHTEKSLSHSPGK

SEQ ID NO: 1725 - protein, 223 aa, Artificial Sequence
  HsIgG2
VECPPCPAPPVAGPSVFLFPPKPKDTLMISRTPEVTCVVVDVSHEDPEVQFNWYVDGMEVHNAKTKPREEQFNSTFRVVSVLTVVHQDWLNGKEYKCKVSNKGLPAPIEKTISKTKGQPREPQVYTLPPSREEMTKNQVSLTCLVKGFYPSDIAVEWESNGQPENNYKTTPPMLDSDGSFFLYSKLTVDKSRWQQGNVFSCSVMHEALHNHYTQKSLSLSPGK

SEQ ID NO: 1726 - protein, 238 aa, Artificial Sequence
  MmIgG2b
PSGPISTINPCPPCKECHKCPAPNLEGGPSVFIFPPNIKDVLMISLTPKVTCVVVDVSEDDPDVQISWFVNNVEVHTAQTQTHREDYNSTIRVVSTLPIQHQDWMSGKEFKCKVNNKDLPSPIERTISKIKGLVRAPQVYILPPPAEQLSRKDVSLTCLVVGFNPGDISVEWTSNGHTEENYKDTAPVLDSDGSYFIYSKLDIKTSKWEKTDSFSCNVRHEGLKNYYLKKTISRSPGK

SEQ ID NO: 1727 - protein, 224 aa, Artificial Sequence
  HsIgG4
PPCPSCPAPEFLGGPSVFLFPPKPKDTLMISRTPEVTCVVVDVSQEDPEVQFNWYVDGVEVHNAKTKPREEQFNSTYRVVSVLTVLHQDWLNGKEYKCKVSNKGLPSSIEKTISKAKGQPREPQVYTLPPSQEEMTKNQVSLTCLVKGFYPSDIAVEWESNGQPENNYKTTPPVLDSDGSFFLYSRLTVDKSRWQEGNVFSCSVMHEALHNHYTQKSLSLSPGK

SEQ ID NO: 1728 - protein, 18 aa, Artificial Sequence
  IgE-leader
MDWTWILFLVAAATRVHS

SEQ ID NO: 1729 - DNA, 186 bp, Artificial Sequence
  Human albumin 3-UTR
catcacatttaaaagcatctcagcctaccatgagaataagagaaagaaaatgaagatcaaaagcttattcatctgtttttctttttcgttggtgtaaagccaacaccctgtctaaaaaacataaatttctttaatcattttgcctcttttctctgtgcttcaattaataaaaaatggaaagaatct

SEQ ID NO: 1730 - DNA, 186 bp, Artificial Sequence
  albumin7 3-UTR
catcacatttaaaagcatctcagcctaccatgagaataagagaaagaaaatgaagatcaatagcttattcatctctttttctttttcgttggtgtaaagccaacaccctgtctaaaaaacataaatttctttaatcattttgcctcttttctctgtgcttcaattaataaaaaatggaaagaacct

SEQ ID NO: 1731 - DNA, 24 bp, Artificial Sequence
  histone stem loop
caaaggctcttttcagagccacca

SEQ ID NO: 1732 - RNA, 1918 nt, Artificial Sequence
  HA membrane bound
gggagaaagcuuaccaugaaggcaauacucguaguucugcuauauacauuugcaaccgcaaaugcagacacauuauguauagguuaucaugcgaacaauucaacagacacuguagacacaguacuagaaaagaauguaacaguaacacacucuguuaaccuucuagaagacaagcauaacgggaaacuaugcaaacuaagagggguagccccauugcauuuggguaaauguaacauugcuggcuggauccugggaaauccagagugugaaucacucuccacagcaagcucaugguccuacauuguggaaacaucuaguucagacaauggaacguguuacccaggagauuucaucgauuaugaggagcuaagagagcaauugagcucagugucaucauuugaaagguuugagauauuccccaagacaaguucauggcccaaucaugacucgaacaaagguguaacggcagcauguccucaugcuggagcaaagagcuucuacaaaaauuuaauauggcuaguuaagaaaggaaauucauacccaaagcucagcaaauccuacauuaaugauaaagggaaagaaguccucgugcuauggggcauucaccauccaucuaccagugcugaccaacaaagucucuaucagaaugcagaugcauauguuuuuguggggucaucaagauacagcaagaaguucaagccggaaauagcaauaagacccaaagugagggaucaagaagggagaaugaacuauuacuggacccuaguagagccgggagacaaaauaacauucgaagcaacuggaaaucuagugguaccgagauaugcauucgcaauggaaagaaaugcuggaucugguauuaucauuucagauacaccaguccacgauugcaauacaacuugucagacacccaagggugcuauaaacaccagccucccauuucagaauauacauccgaucacaauuggaaaauguccaaaauauguaaaaagcacaaaauugagacuggccacaggauugaggaaugucccgucuauucaaucuagaggccuauuuggggccauugccgguuucauugaaggcggguggacagggaugguagauggaugguacgguuaucaccaucaaaaugagcaggggucaggauaugcagccgaccucaagagcacacagaaugccauugacgagauuacuaacaaaguaaauucuguuauugaaaagaugaauacacaguucacagcaguagguaaagaguucaaccaccuggaaaagagaauagagaauuuaaauaagaaaguugaugaugguuuccuggacauuuggacuuacaaugccgaacuguugguucuauuggaaaaugaaagaacuuuggacuaccacgauucaaaugugaagaacuuauaugaaaagguaagaagccagcuaaagaacaaugccaaggaaauuggaaacggcugcuuugaauuuuaccacaaaugcgauaacacgugcauggaaagugucaaaaaugggacuuaugacuacccaaaauacucagaggaagcaaaauuaaacagagaagaaauagaugggguaaagcuggaaucaacaaggauuuaccagauuuuggcgaucuauucaacugucgccaguucauugguacugguagucucccugggggcaaucaguuucuggaugugcucuaaugggucucuacaguguagaauauguauuuaaggacuaguuauaagacugacuagcccgaugggccucccaacgggcccuccuccccuccuugcaccgagauuaauaaaaaaaaaaaaaaaaaaaaaaaaaaaaaaaaaaaaaaaaaaaaaaaaaaaaaaaaaaaaaaaaugcaucccccccccccccccccccccccccccccccaaaggcucuuuucagagccaccagaauu

SEQ ID NO: 1733 - RNA, 2491 nt, Artificial Sequence
  HA(without TM)-IgG FC
gggagaaagcuuaccaugaaggcaauacucguaguucugcuauauacauuugcaaccgcaaaugcagacacauuauguauagguuaucaugcgaacaauucaacagacacuguagacacaguacuagaaaagaauguaacaguaacacacucuguuaaccuucuagaagacaagcauaacgggaaacuaugcaaacuaagagggguagccccauugcauuuggguaaauguaacauugcuggcuggauccugggaaauccagagugugaaucacucuccacagcaagcucaugguccuacauuguggaaacaucuaguucagacaauggaacguguuacccaggagauuucaucgauuaugaggagcuaagagagcaauugagcucagugucaucauuugaaagguuugagauauuccccaagacaaguucauggcccaaucaugacucgaacaaagguguaacggcagcauguccucaugcuggagcaaagagcuucuacaaaaauuuaauauggcuaguuaagaaaggaaauucauacccaaagcucagcaaauccuacauuaaugauaaagggaaagaaguccucgugcuauggggcauucaccauccaucuaccagugcugaccaacaaagucucuaucagaaugcagaugcauauguuuuuguggggucaucaagauacagcaagaaguucaagccggaaauagcaauaagacccaaagugagggaucaagaagggagaaugaacuauuacuggacccuaguagagccgggagacaaaauaacauucgaagcaacuggaaaucuagugguaccgagauaugcauucgcaauggaaagaaaugcuggaucugguauuaucauuucagauacaccaguccacgauugcaauacaacuugucagacacccaagggugcuauaaacaccagccucccauuucagaauauacauccgaucacaauuggaaaauguccaaaauauguaaaaagcacaaaauugagacuggccacaggauugaggaaugucccgucuauucaaucuagaggccuauuuggggccauugccgguuucauugaaggcggguggacagggaugguagauggaugguacgguuaucaccaucaaaaugagcaggggucaggauaugcagccgaccucaagagcacacagaaugccauugacgagauuacuaacaaaguaaauucuguuauugaaaagaugaauacacaguucacagcaguagguaaagaguucaaccaccuggaaaagagaauagagaauuuaaauaagaaaguugaugaugguuuccuggacauuuggacuuacaaugccgaacuguugguucuauuggaaaaugaaagaacuuuggacuaccacgauucaaaugugaagaacuuauaugaaaagguaagaagccagcuaaagaacaaugccaaggaaauuggaaacggcugcuuugaauuuuaccacaaaugcgauaacacgugcauggaaagugucaaaaaugggacuuaugacuacccaaaauacucagaggaagcaaaauuaaacagagaagaaauagaugggguaaagcuggaaucaacaaggauuuaccagauugacaaaacucacacaugcccaccgugcccagcaccugaacuccugggcggaccgucagucuuccucuucccgccaaaacccaaggacacccucaugaucucccggaccccugaggucacaugcguggugguggacgugagccacgaagacccugaggucaaguucaacugguacguggacggcguggaggugcauaaugccaagacaaagccgcgggaggagcaguacaacagcacguaccguguggucagcguccucaccguccugcaccaggacuggcugaauggcaaggaguacaagugcaaggucuccaacaaagcccucccagcccccaucgagaaaaccaucuccaaagccaaagggcagccccgagaaccacagguguacacccugcccccaucccgggaggagaugaccaagaaccaggucagccugaccugccuggucaaaggcuucuaucccagcgacaucgccguggagugggagagcaaugggcagccggagaacaacuacaagaccacgccucccgugcuggacuccgacggcuccuucuuccucuacagcaagcucaccguggacaagagccgguggcagcaggggaacgucuucucaugcuccgugaugcacgaggcucugcacaaccacuacacgcaaaagagccucucccugucuccggguaaaugaggacuaguuauaagacugacuagcccgaugggccucccaacgggcccuccuccccuccuugcaccgagauuaauaaaaaaaaaaaaaaaaaaaaaaaaaaaaaaaaaaaaaaaaaaaaaaaaaaaaaaaaaaaaaaaaugcaucccccccccccccccccccccccccccccccaaaggcucuuuucagagccaccagaauu

SEQ ID NO: 1734 - RNA, 2344 nt, Artificial Sequence
  HA(without TM)-GCN4pII-CD40L
gggagaaagcuuaccaugaaggcaauacucguaguucugcuauauacauuugcaaccgcaaaugcagacacauuauguauagguuaucaugcgaacaauucaacagacacuguagacacaguacuagaaaagaauguaacaguaacacacucuguuaaccuucuagaagacaagcauaacgggaaacuaugcaaacuaagagggguagccccauugcauuuggguaaauguaacauugcuggcuggauccugggaaauccagagugugaaucacucuccacagcaagcucaugguccuacauuguggaaacaucuaguucagacaauggaacguguuacccaggagauuucaucgauuaugaggagcuaagagagcaauugagcucagugucaucauuugaaagguuugagauauuccccaagacaaguucauggcccaaucaugacucgaacaaagguguaacggcagcauguccucaugcuggagcaaagagcuucuacaaaaauuuaauauggcuaguuaagaaaggaaauucauacccaaagcucagcaaauccuacauuaaugauaaagggaaagaaguccucgugcuauggggcauucaccauccaucuaccagugcugaccaacaaagucucuaucagaaugcagaugcauauguuuuuguggggucaucaagauacagcaagaaguucaagccggaaauagcaauaagacccaaagugagggaucaagaagggagaaugaacuauuacuggacccuaguagagccgggagacaaaauaacauucgaagcaacuggaaaucuagugguaccgagauaugcauucgcaauggaaagaaaugcuggaucugguauuaucauuucagauacaccaguccacgauugcaauacaacuugucagacacccaagggugcuauaaacaccagccucccauuucagaauauacauccgaucacaauuggaaaauguccaaaauauguaaaaagcacaaaauugagacuggccacaggauugaggaaugucccgucuauucaaucuagaggccuauuuggggccauugccgguuucauugaaggcggguggacagggaugguagauggaugguacgguuaucaccaucaaaaugagcaggggucaggauaugcagccgaccucaagagcacacagaaugccauugacgagauuacuaacaaaguaaauucuguuauugaaaagaugaauacacaguucacagcaguagguaaagaguucaaccaccuggaaaagagaauagagaauuuaaauaagaaaguugaugaugguuuccuggacauuuggacuuacaaugccgaacuguugguucuauuggaaaaugaaagaacuuuggacuaccacgauucaaaugugaagaacuuauaugaaaagguaagaagccagcuaaagaacaaugccaaggaaauuggaaacggcugcuuugaauuuuaccacaaaugcgauaacacgugcauggaaagugucaaaaaugggacuuaugacuacccaaaauacucagaggaagcaaaauuaaacagagaagaaauagaugggguaaagcuggaaucaacaaggauuuaccagauuggcgagaucgccgcuauuaagcaggaaauagcagccaucaaaaaggagauugcggcuaucaaaugggaaauugccgcaaucaagcaaaugcaaagaggugaugaggauccucaaauugcagcacacguuguaagcgaagccaacaguaaugcagcauccguucuacagugggccaagaaaggauauuauaccaugaaaagcaacuugguaaugcuugaaaaugggaaacagcugacgguuaaaagagaaggacucuauuaugucuacacucaagucaccuucugcucuaaucgggagccuucgagucaacgcccauucaucgucggccucuggcugaagcccagcaguggaucugagagaaucuuacucaaggcggcaaauacccacaguuccucccagcuuugcgagcagcagucuguucacuugggcggaguguuugaauuacaagcuggugcuucuguguuugucaacgugacugaagcaagccaagugauccacagaguuggcuucucaucuuuuggcuuacucaaacucugaggacuaguuauaagacugacuagcccgaugggccucccaacgggcccuccuccccuccuugcaccgagauuaauaaaaaaaaaaaaaaaaaaaaaaaaaaaaaaaaaaaaaaaaaaaaaaaaaaaaaaaaaaaaaaaaugcaucccccccccccccccccccccccccccccccaaaggcucuuuucagagccaccagaauu

SEQ ID NO: 1735 - protein, 566 aa, Artificial Sequence
  HA membrane bound
MKAILVVLLYTFATANADTLCIGYHANNSTDTVDTVLEKNVTVTHSVNLLEDKHNGKLCKLRGVAPLHLGKCNIAGWILGNPECESLSTASSWSYIVETSSSDNGTCYPGDFIDYEELREQLSSVSSFERFEIFPKTSSWPNHDSNKGVTAACPHAGAKSFYKNLIWLVKKGNSYPKLSKSYINDKGKEVLVLWGIHHPSTSADQQSLYQNADAYVFVGSSRYSKKFKPEIAIRPKVRDQEGRMNYYWTLVEPGDKITFEATGNLVVPRYAFAMERNAGSGIIISDTPVHDCNTTCQTPKGAINTSLPFQNIHPITIGKCPKYVKSTKLRLATGLRNVPSIQSRGLFGAIAGFIEGGWTGMVDGWYGYHHQNEQGSGYAADLKSTQNAIDEITNKVNSVIEKMNTQFTAVGKEFNHLEKRIENLNKKVDDGFLDIWTYNAELLVLLENERTLDYHDSNVKNLYEKVRSQLKNNAKEIGNGCFEFYHKCDNTCMESVKNGTYDYPKYSEEAKLNREEIDGVKLESTRIYQILAIYSTVASSLVLVVSLGAISFWMCSNGSLQCRICI

SEQ ID NO: 1736 - protein, 757 aa, Artificial Sequence
  HA(without TM)-IgG FC
MKAILVVLLYTFATANADTLCIGYHANNSTDTVDTVLEKNVTVTHSVNLLEDKHNGKLCKLRGVAPLHLGKCNIAGWILGNPECESLSTASSWSYIVETSSSDNGTCYPGDFIDYEELREQLSSVSSFERFEIFPKTSSWPNHDSNKGVTAACPHAGAKSFYKNLIWLVKKGNSYPKLSKSYINDKGKEVLVLWGIHHPSTSADQQSLYQNADAYVFVGSSRYSKKFKPEIAIRPKVRDQEGRMNYYWTLVEPGDKITFEATGNLVVPRYAFAMERNAGSGIIISDTPVHDCNTTCQTPKGAINTSLPFQNIHPITIGKCPKYVKSTKLRLATGLRNVPSIQSRGLFGAIAGFIEGGWTGMVDGWYGYHHQNEQGSGYAADLKSTQNAIDEITNKVNSVIEKMNTQFTAVGKEFNHLEKRIENLNKKVDDGFLDIWTYNAELLVLLENERTLDYHDSNVKNLYEKVRSQLKNNAKEIGNGCFEFYHKCDNTCMESVKNGTYDYPKYSEEAKLNREEIDGVKLESTRIYQIDKTHTCPPCPAPELLGGPSVFLFPPKPKDTLMISRTPEVTCVVVDVSHEDPEVKFNWYVDGVEVHNAKTKPREEQYNSTYRVVSVLTVLHQDWLNGKEYKCKVSNKALPAPIEKTISKAKGQPREPQVYTLPPSREEMTKNQVSLTCLVKGFYPSDIAVEWESNGQPENNYKTTPPVLDSDGSFFLYSKLTVDKSRWQQGNVFSCSVMHEALHNHYTQKSLSLSPGK

SEQ ID NO: 1737 - protein, 708 aa, Artificial Sequence
  HA(without TM)-GCN4pII-CD40L
MKAILVVLLYTFATANADTLCIGYHANNSTDTVDTVLEKNVTVTHSVNLLEDKHNGKLCKLRGVAPLHLGKCNIAGWILGNPECESLSTASSWSYIVETSSSDNGTCYPGDFIDYEELREQLSSVSSFERFEIFPKTSSWPNHDSNKGVTAACPHAGAKSFYKNLIWLVKKGNSYPKLSKSYINDKGKEVLVLWGIHHPSTSADQQSLYQNADAYVFVGSSRYSKKFKPEIAIRPKVRDQEGRMNYYWTLVEPGDKITFEATGNLVVPRYAFAMERNAGSGIIISDTPVHDCNTTCQTPKGAINTSLPFQNIHPITIGKCPKYVKSTKLRLATGLRNVPSIQSRGLFGAIAGFIEGGWTGMVDGWYGYHHQNEQGSGYAADLKSTQNAIDEITNKVNSVIEKMNTQFTAVGKEFNHLEKRIENLNKKVDDGFLDIWTYNAELLVLLENERTLDYHDSNVKNLYEKVRSQLKNNAKEIGNGCFEFYHKCDNTCMESVKNGTYDYPKYSEEAKLNREEIDGVKLESTRIYQIGEIAAIKQEIAAIKKEIAAIKWEIAAIKQMQRGDEDPQIAAHVVSEANSNAASVLQWAKKGYYTMKSNLVMLENGKQLTVKREGLYYVYTQVTFCSNREPSSQRPFIVGLWLKPSSGSERILLKAANTHSSSQLCEQQSVHLGGVFELQAGASVFVNVTEASQVIHRVGFSSFGLLKL

SEQ ID NO: 1738 - protein, 192 aa, Artificial Sequence
  MmEPO_protein
MGVPERPTLLLLLSLLLIPLGLPVLCAPPRLICDSRVLERYILEAKEAENVTMGCAEGPRLSENITVPDTKVNFYAWKRMEVEEQAIEVWQGLSLLSEAILQAQALLANSSQPPETLQLHIDKAISGLRSLTSLLRVLGAQKELMSPPDTTPPAPLRTLTVDTFCKLFRVYANFLRGKLKLYTGEVCRRGDR

SEQ ID NO: 1739 - protein, 221 aa, Artificial Sequence
  MmEPO-CgB_protein
MGVPERPTLLLLLSLLLIPLGLPVLCAPPRLICDSRVLERYILEAKEAENVTMGCAEGPRLSENITVPDTKVNFYAWKRMEVEEQAIEVWQGLSLLSEAILQAQALLANSSQPPETLQLHIDKAISGLRSLTSLLRVLGAQKELMSPPDTTPPAPLRTLTVDTFCKLFRVYANFLRGKLKLYTGEVCRRGDRGSSSSKAPPPSLPSPSRLPGPSDTPILPQ

SEQ ID NO: 1740 - protein, 481 aa, Artificial Sequence
  MmEPO-Xten_protein
MGVPERPTLLLLLSLLLIPLGLPVLCAPPRLICDSRVLERYILEAKEAENVTMGCAEGPRLSENITVPDTKVNFYAWKRMEVEEQAIEVWQGLSLLSEAILQAQALLANSSQPPETLQLHIDKAISGLRSLTSLLRVLGAQKELMSPPDTTPPAPLRTLTVDTFCKLFRVYANFLRGKLKLYTGEVCRRGDRGGTSESATPESGPGSEPATSGSETPGTSESATPESGPGSEPATSGSETPGTSESATPESGPGTSTEPSEGSAPGSPAGSPTSTEEGTSESATPESGPGSEPATSGSETPGTSESATPESGPGSPAGSPTSTEEGSPAGSPTSTEEGTSTEPSEGSAPGTSESATPESGPGTSESATPESGPGTSESATPESGPGSEPATSGSETPGSEPATSGSETPGSPAGSPTSTEEGTSTEPSEGSAPGTSTEPSEGSAPGSEPATSGSETPGTSESATPESGPGTSTEPSEGSAP

SEQ ID NO: 1741 - protein, 794 aa, Artificial Sequence
  MmEPO-PAS600_protein
MGVPERPTLLLLLSLLLIPLGLPVLCAPPRLICDSRVLERYILEAKEAENVTMGCAEGPRLSENITVPDTKVNFYAWKRMEVEEQAIEVWQGLSLLSEAILQAQALLANSSQPPETLQLHIDKAISGLRSLTSLLRVLGAQKELMSPPDTTPPAPLRTLTVDTFCKLFRVYANFLRGKLKLYTGEVCRRGDRGASPAAPAPASPAAPAPSAPAASPAAPAPASPAAPAPSAPAASPAAPAPASPAAPAPSAPAASPAAPAPASPAAPAPSAPAASPAAPAPASPAAPAPSAPAASPAAPAPASPAAPAPSAPAASPAAPAPASPAAPAPSAPAASPAAPAPASPAAPAPSAPAASPAAPAPASPAAPAPSAPAASPAAPAPASPAAPAPSAPAASPAAPAPASPAAPAPSAPAASPAAPAPASPAAPAPSAPAASPAAPAPASPAAPAPSAPAASPAAPAPASPAAPAPSAPAASPAAPAPASPAAPAPSAPAASPAAPAPASPAAPAPSAPAASPAAPAPASPAAPAPSAPAASPAAPAPASPAAPAPSAPAASPAAPAPASPAAPAPSAPAASPAAPAPASPAAPAPSAPAASPAAPAPASPAAPAPSAPAASPAAPAPASPAAPAPSAPAASPAAPAPASPAAPAPSAPAASPAAPAPASPAAPAPSAPAASPAAPAPASPAAPAPSAPAASPAAPAPASPAAPAPSAPAASPAAPAPASPAAPAPSAPAASPAAPAPASPAAPAPSAPAASPAAPAPASPAAPAPSAPAASPAAPAPASPAAPAPSAPAA

SEQ ID NO: 1742 - protein, 394 aa, Artificial Sequence
  MmEPO-PAS200_protein
MGVPERPTLLLLLSLLLIPLGLPVLCAPPRLICDSRVLERYILEAKEAENVTMGCAEGPRLSENITVPDTKVNFYAWKRMEVEEQAIEVWQGLSLLSEAILQAQALLANSSQPPETLQLHIDKAISGLRSLTSLLRVLGAQKELMSPPDTTPPAPLRTLTVDTFCKLFRVYANFLRGKLKLYTGEVCRRGDRGASPAAPAPASPAAPAPSAPAASPAAPAPASPAAPAPSAPAASPAAPAPASPAAPAPSAPAASPAAPAPASPAAPAPSAPAASPAAPAPASPAAPAPSAPAASPAAPAPASPAAPAPSAPAASPAAPAPASPAAPAPSAPAASPAAPAPASPAAPAPSAPAASPAAPAPASPAAPAPSAPAASPAAPAPASPAAPAPSAPAA

SEQ ID NO: 1743 - protein, 393 aa, Artificial Sequence
  MmEPO-HAP200_protein
MGVPERPTLLLLLSLLLIPLGLPVLCAPPRLICDSRVLERYILEAKEAENVTMGCAEGPRLSENITVPDTKVNFYAWKRMEVEEQAIEVWQGLSLLSEAILQAQALLANSSQPPETLQLHIDKAISGLRSLTSLLRVLGAQKELMSPPDTTPPAPLRTLTVDTFCKLFRVYANFLRGKLKLYTGEVCRRGDRGGGGGSGGGGSGGGGSGGGGSGGGGSGGGGSGGGGSGGGGSGGGGSGGGGSGGGGSGGGGSGGGGSGGGGSGGGGSGGGGSGGGGSGGGGSGGGGSGGGGSGGGGSGGGGSGGGGSGGGGSGGGGSGGGGSGGGGSGGGGSGGGGSGGGGSGGGGSGGGGSGGGGSGGGGSGGGGSGGGGSGGGGSGGGGSGGGGSGGGGS

SEQ ID NO: 1744 - protein, 393 aa, Artificial Sequence
  MmEPO-ELP_protein
MGVPERPTLLLLLSLLLIPLGLPVLCAPPRLICDSRVLERYILEAKEAENVTMGCAEGPRLSENITVPDTKVNFYAWKRMEVEEQAIEVWQGLSLLSEAILQAQALLANSSQPPETLQLHIDKAISGLRSLTSLLRVLGAQKELMSPPDTTPPAPLRTLTVDTFCKLFRVYANFLRGKLKLYTGEVCRRGDRGVGVPGVGVPGVGVPGVGVPGVGVPGVGVPGVGVPGVGVPGVGVPGVGVPGVGVPGVGVPGVGVPGVGVPGVGVPGVGVPGVGVPGVGVPGVGVPGVGVPGVGVPGVGVPGVGVPGVGVPGVGVPGVGVPGVGVPGVGVPGVGVPGVGVPGVGVPGVGVPGVGVPGVGVPGVGVPGVGVPGVGVPGVGVPGVGVPGVGVPG

SEQ ID NO: 1745 - protein, 777 aa, Artificial Sequence
  MmEPO-MmAlb(25-608)_protein
MGVPERPTLLLLLSLLLIPLGLPVLCAPPRLICDSRVLERYILEAKEAENVTMGCAEGPRLSENITVPDTKVNFYAWKRMEVEEQAIEVWQGLSLLSEAILQAQALLANSSQPPETLQLHIDKAISGLRSLTSLLRVLGAQKELMSPPDTTPPAPLRTLTVDTFCKLFRVYANFLRGKLKLYTGEVCRRGDRGEAHKSEIAHRYNDLGEQHFKGLVLIAFSQYLQKCSYDEHAKLVQEVTDFAKTCVADESAANCDKSLHTLFGDKLCAIPNLRENYGELADCCTKQEPERNECFLQHKDDNPSLPPFERPEAEAMCTSFKENPTTFMGHYLHEVARRHPYFYAPELLYYAEQYNEILTQCCAEADKESCLTPKLDGVKEKALVSSVRQRMKCSSMQKFGERAFKAWAVARLSQTFPNADFAEITKLATDLTKVNKECCHGDLLECADDRAELAKYMCENQATISSKLQTCCDKPLLKKAHCLSEVEHDTMPADLPAIAADFVEDQEVCKNYAEAKDVFLGTFLYEYSRRHPDYSVSLLLRLAKKYEATLEKCCAEANPPACYGTVLAEFQPLVEEPKNLVKTNCDLYEKLGEYGFQNAILVRYTQKAPQVSTPTLVEAARNLGRVGTKCCTLPEDQRLPCVEDYLSAILNRVCLLHEKTPVSEHVTKCCSGSLVERRPCFSALTVDETYVPKEFKAETFTFHSDICTLPEKEKQIKKQTALAELVKHKPKATAEQLKTVMDDFAQFLDTCCKAADKDTCFSTEGPNLVTRCKDALA

SEQ ID NO: 1746 - protein, 778 aa, Artificial Sequence
  MmEPO-HsAlb(25-609)_protein
MGVPERPTLLLLLSLLLIPLGLPVLCAPPRLICDSRVLERYILEAKEAENVTMGCAEGPRLSENITVPDTKVNFYAWKRMEVEEQAIEVWQGLSLLSEAILQAQALLANSSQPPETLQLHIDKAISGLRSLTSLLRVLGAQKELMSPPDTTPPAPLRTLTVDTFCKLFRVYANFLRGKLKLYTGEVCRRGDRGDAHKSEVAHRFKDLGEENFKALVLIAFAQYLQQCPFEDHVKLVNEVTEFAKTCVADESAENCDKSLHTLFGDKLCTVATLRETYGEMADCCAKQEPERNECFLQHKDDNPNLPRLVRPEVDVMCTAFHDNEETFLKKYLYEIARRHPYFYAPELLFFAKRYKAAFTECCQAADKAACLLPKLDELRDEGKASSAKQRLKCASLQKFGERAFKAWAVARLSQRFPKAEFAEVSKLVTDLTKVHTECCHGDLLECADDRADLAKYICENQDSISSKLKECCEKPLLEKSHCIAEVENDEMPADLPSLAADFVESKDVCKNYAEAKDVFLGMFLYEYARRHPDYSVVLLLRLAKTYETTLEKCCAAADPHECYAKVFDEFKPLVEEPQNLIKQNCELFEQLGEYKFQNALLVRYTKKVPQVSTPTLVEVSRNLGKVGSKCCKHPEAKRMPCAEDYLSVVLNQLCVLHEKTPVSDRVTKCCTESLVNRRPCFSALEVDETYVPKEFNAETFTFHADICTLSEKERQIKKQTALVELVKHKPKATKEQLKAVMDDFAAFVEKCCKADDKETCFAEEGKKLVAASQAALGL

SEQ ID NO: 1747 - protein, 778 aa, Artificial Sequence
  MmEPO-HsAlb(25-609_K597P)_protein
MGVPERPTLLLLLSLLLIPLGLPVLCAPPRLICDSRVLERYILEAKEAENVTMGCAEGPRLSENITVPDTKVNFYAWKRMEVEEQAIEVWQGLSLLSEAILQAQALLANSSQPPETLQLHIDKAISGLRSLTSLLRVLGAQKELMSPPDTTPPAPLRTLTVDTFCKLFRVYANFLRGKLKLYTGEVCRRGDRGDAHKSEVAHRFKDLGEENFKALVLIAFAQYLQQCPFEDHVKLVNEVTEFAKTCVADESAENCDKSLHTLFGDKLCTVATLRETYGEMADCCAKQEPERNECFLQHKDDNPNLPRLVRPEVDVMCTAFHDNEETFLKKYLYEIARRHPYFYAPELLFFAKRYKAAFTECCQAADKAACLLPKLDELRDEGKASSAKQRLKCASLQKFGERAFKAWAVARLSQRFPKAEFAEVSKLVTDLTKVHTECCHGDLLECADDRADLAKYICENQDSISSKLKECCEKPLLEKSHCIAEVENDEMPADLPSLAADFVESKDVCKNYAEAKDVFLGMFLYEYARRHPDYSVVLLLRLAKTYETTLEKCCAAADPHECYAKVFDEFKPLVEEPQNLIKQNCELFEQLGEYKFQNALLVRYTKKVPQVSTPTLVEVSRNLGKVGSKCCKHPEAKRMPCAEDYLSVVLNQLCVLHEKTPVSDRVTKCCTESLVNRRPCFSALEVDETYVPKEFNAETFTFHADICTLSEKERQIKKQTALVELVKHKPKATKEQLKAVMDDFAAFVEKCCKADDKETCFAEEGPKLVAASQAALGL

SEQ ID NO: 1748 - protein, 403 aa, Artificial Sequence
  MmEPO-linkerG4S-MmAlb(404-608)_protein
MGVPERPTLLLLLSLLLIPLGLPVLCAPPRLICDSRVLERYILEAKEAENVTMGCAEGPRLSENITVPDTKVNFYAWKRMEVEEQAIEVWQGLSLLSEAILQAQALLANSSQPPETLQLHIDKAISGLRSLTSLLRVLGAQKELMSPPDTTPPAPLRTLTVDTFCKLFRVYANFLRGKLKLYTGEVCRRGDRGGGGGSLVEEPKNLVKTNCDLYEKLGEYGFQNAILVRYTQKAPQVSTPTLVEAARNLGRVGTKCCTLPEDQRLPCVEDYLSAILNRVCLLHEKTPVSEHVTKCCSGSLVERRPCFSALTVDETYVPKEFKAETFTFHSDICTLPEKEKQIKKQTALAELVKHKPKATAEQLKTVMDDFAQFLDTCCKAADKDTCFSTEGPNLVTRCKDALA

SEQ ID NO: 1749 - protein, 211 aa, Artificial Sequence
  MmEPO-ABP-SA21_protein
MGVPERPTLLLLLSLLLIPLGLPVLCAPPRLICDSRVLERYILEAKEAENVTMGCAEGPRLSENITVPDTKVNFYAWKRMEVEEQAIEVWQGLSLLSEAILQAQALLANSSQPPETLQLHIDKAISGLRSLTSLLRVLGAQKELMSPPDTTPPAPLRTLTVDTFCKLFRVYANFLRGKLKLYTGEVCRRGDRGRLIEDICLPRWGCLWEDD

SEQ ID NO: 1750 - protein, 239 aa, Artificial Sequence
  MmEPO-SSG148_ABD_SpG_high_protein
MGVPERPTLLLLLSLLLIPLGLPVLCAPPRLICDSRVLERYILEAKEAENVTMGCAEGPRLSENITVPDTKVNFYAWKRMEVEEQAIEVWQGLSLLSEAILQAQALLANSSQPPETLQLHIDKAISGLRSLTSLLRVLGAQKELMSPPDTTPPAPLRTLTVDTFCKLFRVYANFLRGKLKLYTGEVCRRGDRGLAEAKVLANRELDKYGVSDFYKRLINKAKTVEGVEALKLHILAALP

SEQ ID NO: 1751 - protein, 420 aa, Artificial Sequence
  MmEPO-HsIgG1_protein
MGVPERPTLLLLLSLLLIPLGLPVLCAPPRLICDSRVLERYILEAKEAENVTMGCAEGPRLSENITVPDTKVNFYAWKRMEVEEQAIEVWQGLSLLSEAILQAQALLANSSQPPETLQLHIDKAISGLRSLTSLLRVLGAQKELMSPPDTTPPAPLRTLTVDTFCKLFRVYANFLRGKLKLYTGEVCRRGDRGDKTHTCPPCPAPELLGGPSVFLFPPKPKDTLMISRTPEVTCVVVDVSHEDPEVKFNWYVDGVEVHNAKTKPREEQYNSTYRVVSVLTVLHQDWLNGKEYKCKVSNKALPAPIEKTISKAKGQPREPQVYTLPPSREEMTKNQVSLTCLVKGFYPSDIAVEWESNGQPENNYKTTPPVLDSDGSFFLYSKLTVDKSRWQQGNVFSCSVMHEALHNHYTQKSLSLSPGK

SEQ ID NO: 1752 - protein, 415 aa, Artificial Sequence
  MmEPO-MmIgG1_protein
MGVPERPTLLLLLSLLLIPLGLPVLCAPPRLICDSRVLERYILEAKEAENVTMGCAEGPRLSENITVPDTKVNFYAWKRMEVEEQAIEVWQGLSLLSEAILQAQALLANSSQPPETLQLHIDKAISGLRSLTSLLRVLGAQKELMSPPDTTPPAPLRTLTVDTFCKLFRVYANFLRGKLKLYTGEVCRRGDRGGCKPCICTVPEVSSVFIFPPKPKDVLTITLTPKVTCVVVDISKDDPEVQFSWFVDDVEVHTAQTQPREEQFNSTFRSVSELPIMHQDWLNGKEFKCRVNSAAFPAPIEKTISKTKGRPKAPQVYTIPPPKEQMAKDKVSLTCMITDFFPEDITVEWQWNGQPAENYKNTQPIMDTDGSYFVYSKLNVQKSNWEAGNTFTCSVLHEGLHNHHTEKSLSHSPGK

SEQ ID NO: 1753 - protein, 425 aa, Artificial Sequence
  MmEPO-MmIgG2_protein
MGVPERPTLLLLLSLLLIPLGLPVLCAPPRLICDSRVLERYILEAKEAENVTMGCAEGPRLSENITVPDTKVNFYAWKRMEVEEQAIEVWQGLSLLSEAILQAQALLANSSQPPETLQLHIDKAISGLRSLTSLLRVLGAQKELMSPPDTTPPAPLRTLTVDTFCKLFRVYANFLRGKLKLYTGEVCRRGDRGPRGPTIKPCPPCKCPAPNLLGGPSVFIFPPKIKDVLMISLSPIVTCVVVDVSEDDPDVQISWFVNNVEVHTAQTQTHREDYNSTLRVVSALPIQHQDWMSGKEFKCKVNNKDLPAPIERTISKPKGSVRAPQVYVLPPPEEEMTKKQVTLTCMVTDFMPEDIYVEWTNNGKTELNYKNTEPVLDSDGSYFMYSKLRVEKKNWVERNSYSCSVVHEGLHNHHTTKSFSRTPGK

SEQ ID NO: 1754 - protein, 871 aa, Artificial Sequence
  MmEPO-MmTf(20-697)_protein
MGVPERPTLLLLLSLLLIPLGLPVLCAPPRLICDSRVLERYILEAKEAENVTMGCAEGPRLSENITVPDTKVNFYAWKRMEVEEQAIEVWQGLSLLSEAILQAQALLANSSQPPETLQLHIDKAISGLRSLTSLLRVLGAQKELMSPPDTTPPAPLRTLTVDTFCKLFRVYANFLRGKLKLYTGEVCRRGDRGVPDKTVKWCAVSEHENTKCISFRDHMKTVLPPDGPRLACVKKTSYPDCIKAISASEADAMTLDGGWVYDAGLTPNNLKPVAAEFYGSVEHPQTYYYAVAVVKKGTDFQLNQLEGKKSCHTGLGRSAGWVIPIGLLFCKLSEPRSPLEKAVSSFFSGSCVPCADPVAFPKLCQLCPGCGCSSTQPFFGYVGAFKCLKDGGGDVAFVKHTTIFEVLPEKADRDQYELLCLDNTRKPVDQYEDCYLARIPSHAVVARKNNGKEDLIWEILKVAQEHFGKGKSKDFQLFSSPLGKDLLFKDSAFGLLRVPPRMDYRLYLGHNYVTAIRNQQEGVCPEGSIDNSPVKWCALSHLERTKCDEWSIISEGKIECESAETTEDCIEKIVNGEADAMTLDGGHAYIAGQCGLVPVMAEYYESSNCAIPSQQGIFPKGYYAVAVVKASDTSITWNNLKGKKSCHTGVDRTAGWNIPMGMLYNRINHCKFDEFFSQGCAPGYEKNSTLCDLCIGPLKCAPNNKEEYNGYTGAFRCLVEKGDVAFVKHQTVLDNTEGKNPAEWAKNLKQEDFELLCPDGTRKPVKDFASCHLAQAPNHVVVSRKEKAARVKAVLTSQETLFGGSDCTGNFCLFKSTTKDLLFRDDTKCFVKLPEGTTPEKYLGAEYMQSVGNMRKCSTSRLLEACTFHKH

SEQ ID NO: 1755 - protein, 872 aa, Artificial Sequence
  MmEPO-HsTf(20-698)_protein
MGVPERPTLLLLLSLLLIPLGLPVLCAPPRLICDSRVLERYILEAKEAENVTMGCAEGPRLSENITVPDTKVNFYAWKRMEVEEQAIEVWQGLSLLSEAILQAQALLANSSQPPETLQLHIDKAISGLRSLTSLLRVLGAQKELMSPPDTTPPAPLRTLTVDTFCKLFRVYANFLRGKLKLYTGEVCRRGDRGVPDKTVRWCAVSEHEATKCQSFRDHMKSVIPSDGPSVACVKKASYLDCIRAIAANEADAVTLDAGLVYDAYLAPNNLKPVVAEFYGSKEDPQTFYYAVAVVKKDSGFQMNQLRGKKSCHTGLGRSAGWNIPIGLLYCDLPEPRKPLEKAVANFFSGSCAPCADGTDFPQLCQLCPGCGCSTLNQYFGYSGAFKCLKDGAGDVAFVKHSTIFENLANKADRDQYELLCLDNTRKPVDEYKDCHLAQVPSHTVVARSMGGKEDLIWELLNQAQEHFGKDKSKEFQLFSSPHGKDLLFKDSAHGFLKVPPRMDAKMYLGYEYVTAIRNLREGTCPEAPTDECKPVKWCALSHHERLKCDEWSVNSVGKIECVSAETTEDCIAKIMNGEADAMSLDGGFVYIAGKCGLVPVLAENYNKSDNCEDTPEAGYFAVAVVKKSASDLTWDNLKGKKSCHTAVGRTAGWNIPMGLLYNKINHCRFDEFFSEGCAPGSKKDSSLCKLCMGSGLNLCEPNNKEGYYGYTGAFRCLVEKGDVAFVKHQTVPQNTGGKNPDPWAKNLNEKDYELLCLDGTRKPVEEYANCHLARAPNHAVVTRKDKEACVHKILRQQQHLFGSNVTDCSGNFCLFRSETKDLLFRDDTVCLAKLHDRNTYEKYLGEEYVKAVGNLRKCSTSSLLEACTFRRP

SEQ ID NO: 1756 - protein, 252 aa, Artificial Sequence
  MmEPO-Sa_SpA (121-270)_protein
MGVPERPTLLLLLSLLLIPLGLPVLCAPPRLICDSRVLERYILEAKEAENVTMGCAEGPRLSENITVPDTKVNFYAWKRMEVEEQAIEVWQGLSLLSEAILQAQALLANSSQPPETLQLHIDKAISGLRSLTSLLRVLGAQKELMSPPDTTPPAPLRTLTVDTFCKLFRVYANFLRGKLKLYTGEVCRRGDRGADNKFNKEQQNAFYEILHLPNLNEEQRNGFIQSLKDDPSQSANLLAEAKKLNDAQAPKA

SEQ ID NO: 1757 - protein, 420 aa, Artificial Sequence
  MmEPO-Hs_monoIgG1_protein
MGVPERPTLLLLLSLLLIPLGLPVLCAPPRLICDSRVLERYILEAKEAENVTMGCAEGPRLSENITVPDTKVNFYAWKRMEVEEQAIEVWQGLSLLSEAILQAQALLANSSQPPETLQLHIDKAISGLRSLTSLLRVLGAQKELMSPPDTTPPAPLRTLTVDTFCKLFRVYANFLRGKLKLYTGEVCRRGDRGDKTHTSPPSPAPELLGGPSVFLFPPKPKDTLMISRTPEVTCVVVDVSHEDPEVKFNWYVDGVEVHNAKTKPREEQYNSTYRVVSVLTVLHQDWLNGKEYKCKVSNKALPAPIEKTISKAKGQPREPQVYTLPPSREEMTKNQVNLTCLVKGFYPSDIAVEWESNGQPENNYKTTPPVLDSDGSFFLNSTLTVDKSRWQQGNVFSCSVMHEALHNHYTQKSLSLSPGK

SEQ ID NO: 1758 - protein, 647 aa, Artificial Sequence
  MmEPO-Hs_2x-monoIgG1_protein
MGVPERPTLLLLLSLLLIPLGLPVLCAPPRLICDSRVLERYILEAKEAENVTMGCAEGPRLSENITVPDTKVNFYAWKRMEVEEQAIEVWQGLSLLSEAILQAQALLANSSQPPETLQLHIDKAISGLRSLTSLLRVLGAQKELMSPPDTTPPAPLRTLTVDTFCKLFRVYANFLRGKLKLYTGEVCRRGDRGDKTHTSPPSPAPELLGGPSVFLFPPKPKDTLMISRTPEVTCVVVDVSHEDPEVKFNWYVDGVEVHNAKTKPREEQYNSTYRVVSVLTVLHQDWLNGKEYKCKVSNKALPAPIEKTISKAKGQPREPQVYTLPPSREEMTKNQVNLTCLVKGFYPSDIAVEWESNGQPENNYKTTPPVLDSDGSFFLNSTLTVDKSRWQQGNVFSCSVMHEALHNHYTQKSLSLSPGKDKTHTSPPSPAPELLGGPSVFLFPPKPKDTLMISRTPEVTCVVVDVSHEDPEVKFNWYVDGVEVHNAKTKPREEQYNSTYRVVSVLTVLHQDWLNGKEYKCKVSNKALPAPIEKTISKAKGQPREPQVYTLPPSREEMTKNQVNLTCLVKGFYPSDIAVEWESNGQPENNYKTTPPVLDSDGSFFLNSTLTVDKSRWQQGNVFSCSVMHEALHNHYTQKSLSLSPGK

SEQ ID NO: 1759 - protein, 251 aa, Artificial Sequence
  MmEPO-IgBD_protein
MGVPERPTLLLLLSLLLIPLGLPVLCAPPRLICDSRVLERYILEAKEAENVTMGCAEGPRLSENITVPDTKVNFYAWKRMEVEEQAIEVWQGLSLLSEAILQAQALLANSSQPPETLQLHIDKAISGLRSLTSLLRVLGAQKELMSPPDTTPPAPLRTLTVDTFCKLFRVYANFLRGKLKLYTGEVCRRGDRGVDAKYAKEQDAAAHEIRWLPNLTFDQRVAFIHKLADDPSQSSELLSEAKKLNDSQAPK

SEQ ID NO: 1760 - protein, 211 aa, Artificial Sequence
  MmEPO-linkerG4S-IgBP_protein
MGVPERPTLLLLLSLLLIPLGLPVLCAPPRLICDSRVLERYILEAKEAENVTMGCAEGPRLSENITVPDTKVNFYAWKRMEVEEQAIEVWQGLSLLSEAILQAQALLANSSQPPETLQLHIDKAISGLRSLTSLLRVLGAQKELMSPPDTTPPAPLRTLTVDTFCKLFRVYANFLRGKLKLYTGEVCRRGDRGGGGGSDCAWHLGELVWCT

SEQ ID NO: 1761 - protein, 1098 aa, Artificial Sequence
  MmEPO-E-XTEN_protein
MGVPERPTLLLLLSLLLIPLGLPVLCAPPRLICDSRVLERYILEAKEAENVTMGCAEGPRLSENITVPDTKVNFYAWKRMEVEEQAIEVWQGLSLLSEAILQAQALLANSSQPPETLQLHIDKAISGLRSLTSLLRVLGAQKELMSPPDTTPPAPLRTLTVDTFCKLFRVYANFLRGKLKLYTGEVCRRGDRGHGEGTFTSDLSKQMEEEAVRLFIEWLKNGGPSSGAPPPSGGSPAGSPTSTEEGTSESATPESGPGTSTEPSEGSAPGSPAGSPTSTEEGTSTEPSEGSAPGTSTEPSEGSAPGTSESATPESGPGSEPATSGSETPGSEPATSGSETPGSPAGSPTSTEEGTSESATPESGPGTSTEPSEGSAPGTSTEPSEGSAPGSPAGSPTSTEEGTSTEPSEGSAPGTSTEPSEGSAPGTSESATPESGPGTSTEPSEGSAPGTSESATPESGPGSEPATSGSETPGTSTEPSEGSAPGTSTEPSEGSAPGTSESATPESGPGTSESATPESGPGSPAGSPTSTEEGTSESATPESGPGSEPATSGSETPGTSESATPESGPGTSTEPSEGSAPGTSTEPSEGSAPGTSTEPSEGSAPGTSTEPSEGSAPGTSTEPSEGSAPGTSTEPSEGSAPGSPAGSPTSTEEGTSTEPSEGSAPGTSESATPESGPGSEPATSGSETPGTSESATPESGPGSEPATSGSETPGTSESATPESGPGTSTEPSEGSAPGTSESATPESGPGSPAGSPTSTEEGSPAGSPTSTEEGSPAGSPTSTEEGTSESATPESGPGTSTEPSEGSAPGTSESATPESGPGSEPATSGSETPGTSESATPESGPGSEPATSGSETPGTSESATPESGPGTSTEPSEGSAPGSPAGSPTSTEEGTSESATPESGPGSEPATSGSETPGTSESATPESGPGSPAGSPTSTEEGSPAGSPTSTEEGTSTEPSEGSAPGTSESATPESGPGTSESATPESGPGTSESATPESGPGSEPATSGSETPGSEPATSGSETPGSPAGSPTSTEEGTSTEPSEGSAPGTSTEPSEGSAPGSEPATSGSETPGTSESATPESGPGTSTEPSEGSAPG

SEQ ID NO: 1762 - protein, 613 aa, Artificial Sequence
  MmEPO-ELP(420)_protein
MGVPERPTLLLLLSLLLIPLGLPVLCAPPRLICDSRVLERYILEAKEAENVTMGCAEGPRLSENITVPDTKVNFYAWKRMEVEEQAIEVWQGLSLLSEAILQAQALLANSSQPPETLQLHIDKAISGLRSLTSLLRVLGAQKELMSPPDTTPPAPLRTLTVDTFCKLFRVYANFLRGKLKLYTGEVCRRGDRGVGVPGVGVPGVGVPGVGVPGVGVPGVGVPGVGVPGVGVPGVGVPGVGVPGVGVPGVGVPGVGVPGVGVPGVGVPGVGVPGVGVPGVGVPGVGVPGVGVPGVGVPGVGVPGVGVPGVGVPGVGVPGVGVPGVGVPGVGVPGVGVPGVGVPGVGVPGVGVPGVGVPGVGVPGVGVPGVGVPGVGVPGVGVPGVGVPGVGVPGVGVPGVGVPGVGVPGVGVPGVGVPGVGVPGVGVPGVGVPGVGVPGVGVPGVGVPGVGVPGVGVPGVGVPGVGVPGVGVPGVGVPGVGVPGVGVPGVGVPGVGVPGVGVPGVGVPGVGVPGVGVPGVGVPGVGVPGVGVPGVGVPGVGVPGVGVPGVGVPGVGVPGVGVPGVGVPGVGVPGVGVPGVGVPGVGVPGVGVPGVGVPGVGVPGVGVPGVGVPG

SEQ ID NO: 1763 - protein, 244 aa, Artificial Sequence
  MmEPO-linkerG4S-ABP SA15_protein
MGVPERPTLLLLLSLLLIPLGLPVLCAPPRLICDSRVLERYILEAKEAENVTMGCAEGPRLSENITVPDTKVNFYAWKRMEVEEQAIEVWQGLSLLSEAILQAQALLANSSQPPETLQLHIDKAISGLRSLTSLLRVLGAQKELMSPPDTTPPAPLRTLTVDTFCKLFRVYANFLRGKLKLYTGEVCRRGDRGGGGGSLAEAKVLANRELDKYGVSDYYKNLINNAKTVEGVKALIDEILAALP

SEQ ID NO: 1764 - protein, 244 aa, Artificial Sequence; identical to SEQ ID NO: 1763
  MmEPO-linker4GS-ABD SPG_protein

SEQ ID NO: 1765 - protein, 404 aa, Artificial Sequence
  MmEPO-linker4GS-HsAlbDIII(404-609)_protein
MGVPERPTLLLLLSLLLIPLGLPVLCAPPRLICDSRVLERYILEAKEAENVTMGCAEGPRLSENITVPDTKVNFYAWKRMEVEEQAIEVWQGLSLLSEAILQAQALLANSSQPPETLQLHIDKAISGLRSLTSLLRVLGAQKELMSPPDTTPPAPLRTLTVDTFCKLFRVYANFLRGKLKLYTGEVCRRGDRGGGGGSLVEEPQNLIKQNCELFEQLGEYKFQNALLVRYTKKVPQVSTPTLVEVSRNLGKVGSKCCKHPEAKRMPCAEDYLSVVLNQLCVLHEKTPVSDRVTKCCTESLVNRRPCFSALEVDETYVPKEFNAETFTFHADICTLSEKERQIKKQTALVELVKHKPKATKEQLKAVMDDFAAFVEKCCKADDKETCFAEEGKKLVAASQAALGL

SEQ ID NO: 1766 - protein, 415 aa, Artificial Sequence
  MmEPO-monomeric Mm Fc_protein
MGVPERPTLLLLLSLLLIPLGLPVLCAPPRLICDSRVLERYILEAKEAENVTMGCAEGPRLSENITVPDTKVNFYAWKRMEVEEQAIEVWQGLSLLSEAILQAQALLANSSQPPETLQLHIDKAISGLRSLTSLLRVLGAQKELMSPPDTTPPAPLRTLTVDTFCKLFRVYANFLRGKLKLYTGEVCRRGDRGGSKPSISTVPEVSSVFIFPPKPKDVLTITLTPKVTCVVVDISKDDPEVQFSWFVDDVEVHTAQTQPREEQFNSTFRSVSELPIMHQDWLNGKEFKCRVNSAAFPAPIEKTISKTKGRPKAPQVYTIPPPKEQMAKDKVNLTCMITDFFPEDITVEWQWNGQPAENYKNTQPIMDTDGSYFVNSTLNVQKSNWEAGNTFTCSVLHEGLHNHHTEKSLSHSPGK

SEQ ID NO: 1767 - protein, 637 aa, Artificial Sequence
  MmEPO-tandem monomeric MmFc_protein
MGVPERPTLLLLLSLLLIPLGLPVLCAPPRLICDSRVLERYILEAKEAENVTMGCAEGPRLSENITVPDTKVNFYAWKRMEVEEQAIEVWQGLSLLSEAILQAQALLANSSQPPETLQLHIDKAISGLRSLTSLLRVLGAQKELMSPPDTTPPAPLRTLTVDTFCKLFRVYANFLRGKLKLYTGEVCRRGDRGGSKPSISTVPEVSSVFIFPPKPKDVLTITLTPKVTCVVVDISKDDPEVQFSWFVDDVEVHTAQTQPREEQFNSTFRSVSELPIMHQDWLNGKEFKCRVNSAAFPAPIEKTISKTKGRPKAPQVYTIPPPKEQMAKDKVNLTCMITDFFPEDITVEWQWNGQPAENYKNTQPIMDTDGSYFVNSTLNVQKSNWEAGNTFTCSVLHEGLHNHHTEKSLSHSPGKGSKPSISTVPEVSSVFIFPPKPKDVLTITLTPKVTCVVVDISKDDPEVQFSWFVDDVEVHTAQTQPREEQFNSTFRSVSELPIMHQDWLNGKEFKCRVNSAAFPAPIEKTISKTKGRPKAPQVYTIPPPKEQMAKDKVNLTCMITDFFPEDITVEWQWNGQPAENYKNTQPIMDTDGSYFVNSTLNVQKSNWEAGNTFTCSVLHEGLHNHHTEKSLSHSPGK

SEQ ID NO: 1768 - protein, 416 aa, Artificial Sequence
  MmEPO-HsIgG2_protein
MGVPERPTLLLLLSLLLIPLGLPVLCAPPRLICDSRVLERYILEAKEAENVTMGCAEGPRLSENITVPDTKVNFYAWKRMEVEEQAIEVWQGLSLLSEAILQAQALLANSSQPPETLQLHIDKAISGLRSLTSLLRVLGAQKELMSPPDTTPPAPLRTLTVDTFCKLFRVYANFLRGKLKLYTGEVCRRGDRGVECPPCPAPPVAGPSVFLFPPKPKDTLMISRTPEVTCVVVDVSHEDPEVQFNWYVDGMEVHNAKTKPREEQFNSTFRVVSVLTVVHQDWLNGKEYKCKVSNKGLPAPIEKTISKTKGQPREPQVYTLPPSREEMTKNQVSLTCLVKGFYPSDIAVEWESNGQPENNYKTTPPMLDSDGSFFLYSKLTVDKSRWQQGNVFSCSVMHEALHNHYTQKSLSLSPGK

SEQ ID NO: 1769 - protein, 431 aa, Artificial Sequence
  MmEPO-MmIgG2b_protein
MGVPERPTLLLLLSLLLIPLGLPVLCAPPRLICDSRVLERYILEAKEAENVTMGCAEGPRLSENITVPDTKVNFYAWKRMEVEEQAIEVWQGLSLLSEAILQAQALLANSSQPPETLQLHIDKAISGLRSLTSLLRVLGAQKELMSPPDTTPPAPLRTLTVDTFCKLFRVYANFLRGKLKLYTGEVCRRGDRGPSGPISTINPCPPCKECHKCPAPNLEGGPSVFIFPPNIKDVLMISLTPKVTCVVVDVSEDDPDVQISWFVNNVEVHTAQTQTHREDYNSTIRVVSTLPIQHQDWMSGKEFKCKVNNKDLPSPIERTISKIKGLVRAPQVYILPPPAEQLSRKDVSLTCLVVGFNPGDISVEWTSNGHTEENYKDTAPVLDSDGSYFIYSKLDIKTSKWEKTDSFSCNVRHEGLKNYYLKKTISRSPGK

SEQ ID NO: 1770 - protein, 417 aa, Artificial Sequence
  MmEPO-HsIgG4_protein
MGVPERPTLLLLLSLLLIPLGLPVLCAPPRLICDSRVLERYILEAKEAENVTMGCAEGPRLSENITVPDTKVNFYAWKRMEVEEQAIEVWQGLSLLSEAILQAQALLANSSQPPETLQLHIDKAISGLRSLTSLLRVLGAQKELMSPPDTTPPAPLRTLTVDTFCKLFRVYANFLRGKLKLYTGEVCRRGDRGPPCPSCPAPEFLGGPSVFLFPPKPKDTLMISRTPEVTCVVVDVSQEDPEVQFNWYVDGVEVHNAKTKPREEQFNSTYRVVSVLTVLHQDWLNGKEYKCKVSNKGLPSSIEKTISKAKGQPREPQVYTLPPSQEEMTKNQVSLTCLVKGFYPSDIAVEWESNGQPENNYKTTPPVLDSDGSFFLYSRLTVDKSRWQEGNVFSCSVMHEALHNHYTQKSLSLSPGK

SEQ ID NO: 1771 - RNA, 579 nt, Artificial Sequence
  MmEPO_cds
augggcgugcccgagcggccgacccugcuccugcugcucagccugcugcucaucccccuggggcugcccguccucugcgcccccccgcgccugaucugcgacucccgggugcuggagcgcuacauccucgaggccaaggaggcggagaacgugaccaugggcugcgccgaggggccccggcugagcgagaacaucacgguccccgacaccaaggugaacuucuacgccuggaagcgcauggagguggaggagcaggccaucgaggucuggcagggccugucccuccugagcgaggccauccugcaggcgcaggcccuccuggccaacuccagccagcccccggagacacugcagcuccacaucgacaaggccaucuccgggcugcggagccugaccucccuccugcgcgugcugggcgcgcagaaggagcucaugagcccgcccgacacgacccccccggccccgcugcggacccugaccguggacacguucugcaagcuguuccgcgucuacgccaacuuccuccggggcaagcugaagcucuacaccggggaggugugccgccggggcgaccgcuga

SEQ ID NO: 1772 - RNA, 666 nt, Artificial Sequence
  MmEPO-CgB_cds
augggcgugcccgagcggccgacccugcuccugcugcucagccugcugcucaucccccuggggcugcccguccucugcgcccccccgcgccugaucugcgacucccgggugcuggagcgcuacauccucgaggccaaggaggcggagaacgugaccaugggcugcgccgaggggccccggcugagcgagaacaucacgguccccgacaccaaggugaacuucuacgccuggaagcgcauggagguggaggagcaggccaucgaggucuggcagggccugucccuccugagcgaggccauccugcaggcgcaggcccuccuggccaacuccagccagcccccggagacacugcagcuccacaucgacaaggccaucuccgggcugcggagccugaccucccuccugcgcgugcugggcgcgcagaaggagcucaugagcccgcccgacacgacccccccggccccgcugcggacccugaccguggacacguucugcaagcuguuccgcgucuacgccaacuuccuccggggcaagcugaagcucuacaccggggaggugugccgccggggcgaccgcggcagcuccagcuccaaggccccgccgcccagccugcccucccccagccgccuccccggccccuccgacacccccauccugccccaguga

SEQ ID NO: 1773 - RNA, 1446 nt, Artificial Sequence
  MmEPO-Xten_cds
augggcgugcccgagcggccgacccugcuccugcugcucagccugcugcucaucccccuggggcugcccguccucugcgcccccccgcgccugaucugcgacucccgggugcuggagcgcuacauccucgaggccaaggaggcggagaacgugaccaugggcugcgccgaggggccccggcugagcgagaacaucacgguccccgacaccaaggugaacuucuacgccuggaagcgcauggagguggaggagcaggccaucgaggucuggcagggccugucccuccugagcgaggccauccugcaggcgcaggcccuccuggccaacuccagccagcccccggagacacugcagcuccacaucgacaaggccaucuccgggcugcggagccugaccucccuccugcgcgugcugggcgcgcagaaggagcucaugagcccgcccgacacgacccccccggccccgcugcggacccugaccguggacacguucugcaagcuguuccgcgucuacgccaacuuccuccggggcaagcugaagcucuacaccggggaggugugccgccggggcgaccgcggcggcaccagcgaguccgccacccccgagagcgggccgggcuccgagcccgccacgagcggguccgagacccccggcaccagcgaguccgcgacccccgagagcgggccgggcuccgagcccgccacgagcggcuccgagacccccgggaccagcgaguccgccacccccgagagcggcccggggacguccaccgagcccagcgagggcuccgcccccgggagccccgccggcuccccgaccagcaccgaggagggcacgagcgaguccgcgacccccgagagcgggcccggcuccgagcccgccaccagcggguccgagaccccgggcacgagcgaguccgccacccccgagagcggccccgggucccccgccggcagcccgaccuccaccgaggaggggagccccgcgggcucccccacgagcaccgaggaggggaccuccaccgagcccagcgagggcuccgccccgggcacgagcgaguccgccacccccgagagcgggcccggcaccagcgaguccgccacccccgagagcgggccgggcacguccgagagcgccacccccgaguccgggcccggcagcgagccggcgaccuccggcagcgagacccccggguccgagcccgccacgagcggcuccgagacccccgggagcccggccggcucccccaccagcaccgaggaggggacguccaccgagcccagcgagggcuccgcccccggcaccagcaccgagccgagcgagggguccgcccccggcagcgagcccgcgaccuccgggagcgagacgcccggcaccuccgagagcgccaccccggaguccggccccgggaccagcacggagcccuccgagggcagcgcccccuga

SEQ ID NO: 1774 - RNA, 2385 nt, Artificial Sequence
  MmEPO-PAS600_cds
augggcgugcccgagcggccgacccugcuccugcugcucagccugcugcucaucccccuggggcugcccguccucugcgcccccccgcgccugaucugcgacucccgggugcuggagcgcuacauccucgaggccaaggaggcggagaacgugaccaugggcugcgccgaggggccccggcugagcgagaacaucacgguccccgacaccaaggugaacuucuacgccuggaagcgcauggagguggaggagcaggccaucgaggucuggcagggccugucccuccugagcgaggccauccugcaggcgcaggcccuccuggccaacuccagccagcccccggagacacugcagcuccacaucgacaaggccaucuccgggcugcggagccugaccucccuccugcgcgugcugggcgcgcagaaggagcucaugagcccgcccgacacgacccccccggccccgcugcggacccugaccguggacacguucugcaagcuguuccgcgucuacgccaacuuccuccggggcaagcugaagcucuacaccggggaggugugccgccggggcgaccgcggcgcuucuccugcugcuccugcuccagcuucuccagcagcuccagcaccuucugcaccagcugcaucuccagccgcaccggcaccagcuaguccugcagcaccagcuccuagcgcuccagcugcuagcccagcugcucccgcaccagcaucacccgcugcacccgcuccaagugcaccagcagcaagucccgcagcucccgcuccggcaaguccagcugcuccagcuccaucagcucccgcagcaucuccugcugcaccagcaccggcaucaccggcagcaccagcaccauccgcuccagcagcuucacccgccgcuccggcuccagccucaccagccgcaccagcuccgucagcaccagcagcuagcccugccgcuccugcuccugcuagucccgccgcaccagcaccaagugcucccgcugcuucaccggcugcuccagcaccagcuaguccagccgcuccugcaccaagcgcaccagccgcuucaccagcagcacccgcuccggcuucucccgcagcaccggcuccaucugcacccgcugcuaguccggcagcuccggcuccugcaucuccugcagcucccgcaccaagcgcuccggcugccaguccugccgcuccagcuccagcaagcccugcugcacccgcaccaucagcaccagcugcuuccccggcagcuccugcuccggcuucacccgcugcuccagcuccaagcgcuccugccgcuucuccggccgcaccagcuccagcaucuccggcugcucccgcuccuucugcuccugcugcuuccccagcugcaccggcuccagcaagcccagcagcuccugcuccuagugcuccugcugccucuccagcagcucccgcuccagccaguccugcagcuccggcaccgucugcucccgccgcuaguccagcagcaccagcaccagcuucuccagcugcacccgcaccgagcgcuccagcagcauccccugcagcuccagcuccugcuagcccagcagcaccggcuccgagugcaccggcagccucaccggcagcuccagcuccagcuucuccugccgcaccggcaccuucagcuccagcagccucuccagcugcuccugcaccggcuagcccugcugcuccagcaccaagugcaccggcagcauccccagccgcuccagcaccggccucuccggccgcuccugcuccauccgcaccagcugcaagccccgcugcaccagcuccggcuaguccggcugcaccggcaccuagcgcacccgcugcaagcccugcagcuccugcaccagcaaguccggcugcuccugcaccuuccgcuccggccgcuucucccgcagcuccugcuccugcaagccccgcagcucccgcaccuagugcacccgcagcuagcccagcugcaccagcuccagcuucacccgcagcuccggcaccuagcgcuccagccgcaucuccagcagcuccggcuccugcuucaccggcugcacccgcuccguccgcaccagccgcaucaccggccgcuccagcaccagcaucuccagcagcaccagcuccgagcgcaccagccgccaguccugcugcacccgcuccggcaucuccagccgcuccagcaccuagugcuccagcagcaaguccugccgcaccggcuccggcuucaccggcagcucccgcaccgucagcuccggcugcaucaccagcagcacccgcaccagcaagcccugccgcuccagcuccgucugcuccagcugccucuccggcugcuccagcuccggccucuccagcugcaccagcaccgucugcuccagccgcauga

SEQ ID NO: 1775 - RNA, 1185 nt, Artificial Sequence
  MmEPO-PAS200_cds
augggcgugcccgagcggccgacccugcuccugcugcucagccugcugcucaucccccuggggcugcccguccucugcgcccccccgcgccugaucugcgacucccgggugcuggagcgcuacauccucgaggccaaggaggcggagaacgugaccaugggcugcgccgaggggccccggcugagcgagaacaucacgguccccgacaccaaggugaacuucuacgccuggaagcgcauggagguggaggagcaggccaucgaggucuggcagggccugucccuccugagcgaggccauccugcaggcgcaggcccuccuggccaacuccagccagcccccggagacacugcagcuccacaucgacaaggccaucuccgggcugcggagccugaccucccuccugcgcgugcugggcgcgcagaaggagcucaugagcccgcccgacacgacccccccggccccgcugcggacccugaccguggacacguucugcaagcuguuccgcgucuacgccaacuuccuccggggcaagcugaagcucuacaccggggaggugugccgccggggcgaccgcggcgcuucuccugcugcuccugcuccagcuucuccagcagcuccagcaccuucugcaccagcugcaucuccagccgcaccggcaccagcuaguccugcagcaccagcuccuagcgcuccagcugcuagcccagcugcucccgcaccagcaucacccgcugcacccgcuccaagugcaccagcagcaagucccgcagcucccgcuccggcaaguccagcugcuccagcuccaucagcucccgcagcaucuccugcugcaccagcaccggcaucaccggcagcaccagcaccauccgcuccagcagcuucacccgccgcuccggcuccagccucaccagccgcaccagcuccgucagcaccagcagcuagcccugccgcuccugcuccugcuagucccgccgcaccagcaccaagugcucccgcugcuucaccggcugcuccagcaccagcuaguccagccgcuccugcaccaagcgcaccagccgcuucaccagcagcacccgcuccggcuucucccgcagcaccggcuccaucugcacccgcugcuaguccggcagcuccggcuccugcaucuccugcagcucccgcaccaagcgcuccggcugccuga

SEQ ID NO: 1776 - RNA, 1182 nt, Artificial Sequence
  MmEPO-HAP200_cds
augggcgugcccgagcggccgacccugcuccugcugcucagccugcugcucaucccccuggggcugcccguccucugcgcccccccgcgccugaucugcgacucccgggugcuggagcgcuacauccucgaggccaaggaggcggagaacgugaccaugggcugcgccgaggggccccggcugagcgagaacaucacgguccccgacaccaaggugaacuucuacgccuggaagcgcauggagguggaggagcaggccaucgaggucuggcagggccugucccuccugagcgaggccauccugcaggcgcaggcccuccuggccaacuccagccagcccccggagacacugcagcuccacaucgacaaggccaucuccgggcugcggagccugaccucccuccugcgcgugcugggcgcgcagaaggagcucaugagcccgcccgacacgacccccccggccccgcugcggacccugaccguggacacguucugcaagcuguuccgcgucuacgccaacuuccuccggggcaagcugaagcucuacaccggggaggugugccgccggggcgaccgcggcggaggcggaggaucuggcggagguggaaguggcggaggcgguucugguggugguggcucugguggcggcgguucaggcggcggaggaagcggaggcggcggaaguggugguggcgguagcggcggaggcggaucaggcggaggcggcucuggcggcggagguaguggcggcgguggcucuggcgguggcggcagcgguggcggagguuccggugguggcgguucuggcggugguggaucaggcggcgguggauccgguggcggaggcagugguggcggcggaagcggagguggugguucuggcggaggcgguagcggagguggcggaagcggaggcggagguagcgguggcggaggaucugguggcgguggcucaggcggaggcgguaguggcggcggaggaucaggugguggcggauccggugguggugguagcggaggcgguggcagcggcggaggcggcaguggcggugguggaagugguggcgguggaaguggcggcggaggcucaggcggcggagguuccggcggaggcggaagcgguggcgguggcucuggcggcgguggaucuggcggaggcggaucagguggcggaggaucuuga

SEQ ID NO: 1777 - RNA, 1182 nt, Artificial Sequence
  MmEPO-ELP_cds
augggcgugcccgagcggccgacccugcuccugcugcucagccugcugcucaucccccuggggcugcccguccucugcgcccccccgcgccugaucugcgacucccgggugcuggagcgcuacauccucgaggccaaggaggcggagaacgugaccaugggcugcgccgaggggccccggcugagcgagaacaucacgguccccgacaccaaggugaacuucuacgccuggaagcgcauggagguggaggagcaggccaucgaggucuggcagggccugucccuccugagcgaggccauccugcaggcgcaggcccuccuggccaacuccagccagcccccggagacacugcagcuccacaucgacaaggccaucuccgggcugcggagccugaccucccuccugcgcgugcugggcgcgcagaaggagcucaugagcccgcccgacacgacccccccggccccgcugcggacccugaccguggacacguucugcaagcuguuccgcgucuacgccaacuuccuccggggcaagcugaagcucuacaccggggaggugugccgccggggcgaccgcggcguuggaguuccuggcguggguguuccagguguuggagugccaggugucggcgucccaggcgugggagugcccggcguuggugucccuggugucgguguuccuggcgucggagucccugguguuggcguccccgguguuggagucccaggcguugguguuccuggcguuggcgugcccggcgugggaguuccuggcguuggaguuccuggcgucggagugccaggcguuggaguccccggcgugggcgucccaggcgucggaguuccaggugucgguguucccggugucggaguuccaggcgugggugucccuggcguggguguccccggugucggcgugcccggcguuggcguucccgguguuggcguucccggcgucgguguccccggcguuggagugccugguguuggugucccuggcgugggaguuccaggcgugggcguucccggcgucgguguuccuggugucggcgucccaggcguuggaguuccuggcgugggaguccccggugucggaguuccugguguuggagugcccggcgucgguguuccaggcgugggaguuccaggcgucggagucccaggugucggagugccaggauga

SEQ ID NO: 1778 - RNA, 2334 nt, Artificial Sequence
  MmEPO-MmAlb(25-608)_cds
augggcgugcccgagcggccgacccugcuccugcugcucagccugcugcucaucccccuggggcugcccguccucugcgcccccccgcgccugaucugcgacucccgggugcuggagcgcuacauccucgaggccaaggaggcggagaacgugaccaugggcugcgccgaggggccccggcugagcgagaacaucacgguccccgacaccaaggugaacuucuacgccuggaagcgcauggagguggaggagcaggccaucgaggucuggcagggccugucccuccugagcgaggccauccugcaggcgcaggcccuccuggccaacuccagccagcccccggagacacugcagcuccacaucgacaaggccaucuccgggcugcggagccugaccucccuccugcgcgugcugggcgcgcagaaggagcucaugagcccgcccgacacgacccccccggccccgcugcggacccugaccguggacacguucugcaagcuguuccgcgucuacgccaacuuccuccggggcaagcugaagcucuacaccggggaggugugccgccggggcgaccgcggcgaggcccacaagagcgagaucgcccaccgcuacaacgaccugggcgagcagcacuucaaggggcucgugcugaucgcguucucccaguaccugcagaagugcagcuacgacgagcacgccaagcucguccaggaggugaccgacuucgccaagaccugcguggccgacgaguccgccgcgaacugcgacaagagccugcacacccuguucggcgacaagcucugcgccauccccaaccugcgggagaacuacggggagcuggccgacugcugcaccaagcaggagccggagcgcaacgagugcuuccuccagcacaaggacgacaaccccucccugccgcccuucgagcggcccgaggccgaggcgaugugcaccagcuucaaggagaaccccaccacguucaugggccacuaccugcacgaggucgcccgccggcaccccuacuucuacgcccccgagcuccuguacuacgccgagcaguacaacgagauccugacccagugcugcgccgaggcggacaaggaguccugccucaccccgaagcuggacggggugaaggagaaggcccuggugagcuccguccgccagcggaugaagugcagcuccaugcagaaguucggcgagcgcgccuucaaggccugggccguggcgcggcucagccagaccuuccccaacgccgacuucgccgagaucacgaagcuggccaccgaccugaccaaggugaacaaggagugcugccacggcgaccuccuggagugcgccgacgaccgcgcggagcuggccaaguacaugugcgagaaccaggccaccaucuccagcaagcuccagacgugcugcgacaagccccugcugaagaaggcccacugccucuccgaggucgagcacgacaccaugcccgccgaccugccggcgaucgccgccgacuucguggaggaccaggaggugugcaagaacuacgccgaggcgaaggacgucuuccuggggaccuuccucuacgaguacagccggcgccaccccgacuacuccgugagccugcugcuccggcuggccaagaaguacgaggccacccuggagaagugcugcgccgaggccaacccgcccgcgugcuacggcacggugcucgccgaguuccagccccuggucgaggagcccaagaaccuggugaagaccaacugcgaccucuacgagaagcugggggaguacggcuuccagaacgccauccuggugcgcuacacccagaaggcgccccaggucuccacccccacgcucguggaggccgcccggaaccuggggcgcgugggcaccaagugcugcacccugccggaggaccagcggcuccccugcgucgaggacuaccugagcgccauccugaaccgcgugugccuccugcacgagaagacccccgugagcgagcacgucacgaagugcugcuccggcagccugguggagcggcgccccugcuucuccgcccugaccgucgacgagaccuacgugccgaaggaguucaaggccgagaccuucacguuccacagcgacaucugcacccuccccgagaaggagaagcagaucaagaagcagaccgcccuggcggagcuggugaagcacaagcccaaggccaccgccgagcagcucaagacggucauggacgacuucgcccaguuccuggacacgugcugcaaggcggccgacaaggacacgugcuucuccaccgaggggcccaaccuggugacccggugcaaggacgcccucgccuga

SEQ ID NO: 1779 - RNA, 2337 nt, Artificial Sequence
  MmEPO-HsAlb(25-609)_cds
augggcgugcccgagcggccgacccugcuccugcugcucagccugcugcucaucccccuggggcugcccguccucugcgcccccccgcgccugaucugcgacucccgggugcuggagcgcuacauccucgaggccaaggaggcggagaacgugaccaugggcugcgccgaggggccccggcugagcgagaacaucacgguccccgacaccaaggugaacuucuacgccuggaagcgcauggagguggaggagcaggccaucgaggucuggcagggccugucccuccugagcgaggccauccugcaggcgcaggcccuccuggccaacuccagccagcccccggagacacugcagcuccacaucgacaaggccaucuccgggcugcggagccugaccucccuccugcgcgugcugggcgcgcagaaggagcucaugagcccgcccgacacgacccccccggccccgcugcggacccugaccguggacacguucugcaagcuguuccgcgucuacgccaacuuccuccggggcaagcugaagcucuacaccggggaggugugccgccggggcgaccgcggcgacgcccacaagagcgagguggcccaccgcuucaaggaccugggcgaggagaacuucaaggcgcucguccugaucgccuucgcccaguaccugcagcagugccccuucgaggaccacgugaagcucgugaacgaggucaccgaguucgccaagaccugcguggccgacgaguccgcggagaacugcgacaagagccugcacacgcuguucggggacaagcucugcaccguggccacccugcgggagaccuacggcgagauggccgacugcugcgccaagcaggagccggagcgcaacgagugcuuccugcagcacaaggacgacaaccccaaccucccccggcugguccgccccgagguggacgugaugugcacggcguuccacgacaacgaggagaccuuccugaagaaguaccucuacgagaucgcccggcgccacccguacuucuacgcccccgagcugcuguucuucgccaagcgguacaaggccgcguucaccgagugcugccaggccgccgacaaggccgccugccuccugcccaagcuggacgagcuccgcgacgaggggaaggcguccagcgccaagcagcggcugaagugcgccucccugcagaaguucggcgagcgcgccuucaaggccugggcggucgcccggcucagccagcgcuuccccaaggccgaguucgccgagguguccaagcuggugaccgaccugacgaagguccacaccgagugcugccacggggaccuccuggagugcgccgacgaccgggcggaccuggccaaguacaucugcgagaaccaggacagcaucuccagcaagcucaaggagugcugcgagaagccgcugcuggagaagucccacugcaucgccgagguggagaacgacgagaugcccgccgaccuccccagccuggcggccgacuucguggaguccaaggacgucugcaagaacuacgccgaggccaaggacguguuccugggcauguuccucuacgaguacgcccgccggcaccccgacuacagcgugguccugcugcuccgccuggcgaagaccuacgagaccacgcuggagaagugcugcgccgccgccgacccgcacgagugcuacgccaagguguucgacgaguucaagccccucguggaggagccccagaaccugaucaagcagaacugcgagcuguucgagcagcucggcgaguacaaguuccagaacgcgcugcugguccgguacaccaagaaggugccccagguguccaccccgacccucgucgaggugagccgcaaccuggggaaggucggcuccaagugcugcaagcaccccgaggccaagcggaugcccugcgccgaggacuaccugagcguggugcucaaccagcugugcguccugcacgagaagacgcccguguccgaccgcgugaccaagugcugcaccgagagccuggucaaccggcgcccgugcuucagcgcccucgagguggacgagaccuacgugcccaaggaguucaacgccgagacguucaccuuccacgcggacaucugcacccuguccgagaaggagcgccagaucaagaagcagaccgcccuggucgagcucgugaagcacaagcccaaggccacgaaggagcagcugaaggccgugauggacgacuucgcggccuucgucgagaagugcugcaaggccgacgacaaggagaccugcuucgccgaggaggggaagaagcugguggccgcgagccaggccgcccucggccuguga

SEQ ID NO: 1780 - RNA, 2337 nt, Artificial Sequence
  MmEPO-HsAlb(25-609_K597P)_cds
augggcgugcccgagcggccgacccugcuccugcugcucagccugcugcucaucccccuggggcugcccguccucugcgcccccccgcgccugaucugcgacucccgggugcuggagcgcuacauccucgaggccaaggaggcggagaacgugaccaugggcugcgccgaggggccccggcugagcgagaacaucacgguccccgacaccaaggugaacuucuacgccuggaagcgcauggagguggaggagcaggccaucgaggucuggcagggccugucccuccugagcgaggccauccugcaggcgcaggcccuccuggccaacuccagccagcccccggagacacugcagcuccacaucgacaaggccaucuccgggcugcggagccugaccucccuccugcgcgugcugggcgcgcagaaggagcucaugagcccgcccgacacgacccccccggccccgcugcggacccugaccguggacacguucugcaagcuguuccgcgucuacgccaacuuccuccggggcaagcugaagcucuacaccggggaggugugccgccggggcgaccgcggcgacgcccacaagagcgagguggcccaccgcuucaaggaccugggcgaggagaacuucaaggcgcucguccugaucgccuucgcccaguaccugcagcagugccccuucgaggaccacgugaagcucgugaacgaggucaccgaguucgccaagaccugcguggccgacgaguccgcggagaacugcgacaagagccugcacacgcuguucggggacaagcucugcaccguggccacccugcgggagaccuacggcgagauggccgacugcugcgccaagcaggagccggagcgcaacgagugcuuccugcagcacaaggacgacaaccccaaccucccccggcugguccgccccgagguggacgugaugugcacggcguuccacgacaacgaggagaccuuccugaagaaguaccucuacgagaucgcccggcgccacccguacuucuacgcccccgagcugcuguucuucgccaagcgguacaaggccgcguucaccgagugcugccaggccgccgacaaggccgccugccuccugcccaagcuggacgagcuccgcgacgaggggaaggcguccagcgccaagcagcggcugaagugcgccucccugcagaaguucggcgagcgcgccuucaaggccugggcggucgcccggcucagccagcgcuuccccaaggccgaguucgccgagguguccaagcuggugaccgaccugacgaagguccacaccgagugcugccacggggaccuccuggagugcgccgacgaccgggcggaccuggccaaguacaucugcgagaaccaggacagcaucuccagcaagcucaaggagugcugcgagaagccgcugcuggagaagucccacugcaucgccgagguggagaacgacgagaugcccgccgaccuccccagccuggcggccgacuucguggaguccaaggacgucugcaagaacuacgccgaggccaaggacguguuccugggcauguuccucuacgaguacgcccgccggcaccccgacuacagcgugguccugcugcuccgccuggcgaagaccuacgagaccacgcuggagaagugcugcgccgccgccgacccgcacgagugcuacgccaagguguucgacgaguucaagccccucguggaggagccccagaaccugaucaagcagaacugcgagcuguucgagcagcucggcgaguacaaguuccagaacgcgcugcugguccgguacaccaagaaggugccccagguguccaccccgacccucgucgaggugagccgcaaccuggggaaggucggcuccaagugcugcaagcaccccgaggccaagcggaugcccugcgccgaggacuaccugagcguggugcucaaccagcugugcguccugcacgagaagacgcccguguccgaccgcgugaccaagugcugcaccgagagccuggucaaccggcgcccgugcuucagcgcccucgagguggacgagaccuacgugcccaaggaguucaacgccgagacguucaccuuccacgcggacaucugcacccuguccgagaaggagcgccagaucaagaagcagaccgcccuggucgagcucgugaagcacaagcccaaggccacgaaggagcagcugaaggccgugauggacgacuucgcggccuucgucgagaagugcugcaaggccgacgacaaggagaccugcuucgccgaggaggggcccaagcugguggccgcgagccaggccgcccucggccuguga

SEQ ID NO: 1781 - RNA, 1212 nt, Artificial Sequence
  MmEPO-linkerG4S-MmAlb(404-608)_cds
augggcgugcccgagcggccgacccugcuccugcugcucagccugcugcucaucccccuggggcugcccguccucugcgcccccccgcgccugaucugcgacucccgggugcuggagcgcuacauccucgaggccaaggaggcggagaacgugaccaugggcugcgccgaggggccccggcugagcgagaacaucacgguccccgacaccaaggugaacuucuacgccuggaagcgcauggagguggaggagcaggccaucgaggucuggcagggccugucccuccugagcgaggccauccugcaggcgcaggcccuccuggccaacuccagccagcccccggagacacugcagcuccacaucgacaaggccaucuccgggcugcggagccugaccucccuccugcgcgugcugggcgcgcagaaggagcucaugagcccgcccgacacgacccccccggccccgcugcggacccugaccguggacacguucugcaagcuguuccgcgucuacgccaacuuccuccggggcaagcugaagcucuacaccggggaggugugccgccggggcgaccgcggcggcgggggcggcucccuggucgaggagcccaagaaccuggugaagaccaacugcgaccucuacgagaagcugggggaguacggcuuccagaacgccauccuggugcgcuacacccagaaggcgccccaggucuccacccccacgcucguggaggccgcccggaaccuggggcgcgugggcaccaagugcugcacccugccggaggaccagcggcuccccugcgucgaggacuaccugagcgccauccugaaccgcgugugccuccugcacgagaagacccccgugagcgagcacgucacgaagugcugcuccggcagccugguggagcggcgccccugcuucuccgcccugaccgucgacgagaccuacgugccgaaggaguucaaggccgagaccuucacguuccacagcgacaucugcacccuccccgagaaggagaagcagaucaagaagcagaccgcccuggcggagcuggugaagcacaagcccaaggccaccgccgagcagcucaagacggucauggacgacuucgcccaguuccuggacacgugcugcaaggcggccgacaaggacacgugcuucuccaccgaggggcccaaccuggugacccggugcaaggacgcccucgccuga

SEQ ID NO: 1782 - RNA, 636 nt, Artificial Sequence
  MmEPO-ABP-SA21_cds
augggcgugcccgagcggccgacccugcuccugcugcucagccugcugcucaucccccuggggcugcccguccucugcgcccccccgcgccugaucugcgacucccgggugcuggagcgcuacauccucgaggccaaggaggcggagaacgugaccaugggcugcgccgaggggccccggcugagcgagaacaucacgguccccgacaccaaggugaacuucuacgccuggaagcgcauggagguggaggagcaggccaucgaggucuggcagggccugucccuccugagcgaggccauccugcaggcgcaggcccuccuggccaacuccagccagcccccggagacacugcagcuccacaucgacaaggccaucuccgggcugcggagccugaccucccuccugcgcgugcugggcgcgcagaaggagcucaugagcccgcccgacacgacccccccggccccgcugcggacccugaccguggacacguucugcaagcuguuccgcgucuacgccaacuuccuccggggcaagcugaagcucuacaccggggaggugugccgccggggcgaccgcggccgccugaucgaggacaucugccucccccgguggggcugccugugggaggacgacuga

SEQ ID NO: 1783 - RNA, 720 nt, Artificial Sequence
  MmEPO-SSG148_ABD_SpG_high_cds
augggcgugcccgagcggccgacccugcuccugcugcucagccugcugcucaucccccuggggcugcccguccucugcgcccccccgcgccugaucugcgacucccgggugcuggagcgcuacauccucgaggccaaggaggcggagaacgugaccaugggcugcgccgaggggccccggcugagcgagaacaucacgguccccgacaccaaggugaacuucuacgccuggaagcgcauggagguggaggagcaggccaucgaggucuggcagggccugucccuccugagcgaggccauccugcaggcgcaggcccuccuggccaacuccagccagcccccggagacacugcagcuccacaucgacaaggccaucuccgggcugcggagccugaccucccuccugcgcgugcugggcgcgcagaaggagcucaugagcccgcccgacacgacccccccggccccgcugcggacccugaccguggacacguucugcaagcuguuccgcgucuacgccaacuuccuccggggcaagcugaagcucuacaccggggaggugugccgccggggcgaccgcggccuggccgaggccaaggugcucgcgaaccgcgagcuggacaaguacggcgucagcgacuucuacaagcggcugaucaacaaggccaagaccguggaggggguggaggcccucaagcugcacauccuggccgcccuccccuga

SEQ ID NO: 1784 - RNA, 1263 nt, Artificial Sequence
  MmEPO-HsIgG1_cds
augggcgugcccgagcggccgacccugcuccugcugcucagccugcugcucaucccccuggggcugcccguccucugcgcccccccgcgccugaucugcgacucccgggugcuggagcgcuacauccucgaggccaaggaggcggagaacgugaccaugggcugcgccgaggggccccggcugagcgagaacaucacgguccccgacaccaaggugaacuucuacgccuggaagcgcauggagguggaggagcaggccaucgaggucuggcagggccugucccuccugagcgaggccauccugcaggcgcaggcccuccuggccaacuccagccagcccccggagacacugcagcuccacaucgacaaggccaucuccgggcugcggagccugaccucccuccugcgcgugcugggcgcgcagaaggagcucaugagcccgcccgacacgacccccccggccccgcugcggacccugaccguggacacguucugcaagcuguuccgcgucuacgccaacuuccuccggggcaagcugaagcucuacaccggggaggugugccgccggggcgaccgcggcgacaagacccacacgugcccgcccugccccgcccccgagcugcucggcgggcccagcguguuccuguucccgcccaagcccaaggacacccugaugaucucccgcacccccgaggugaccugcgucguggucgacgugagccacgaggacccggaggugaaguucaacugguacgucgacggcguggaggugcacaacgccaagaccaagccccgggaggagcaguacaacuccacguaccgcgucgugagcgugcucaccguccugcaccaggacuggcugaacgggaaggaguacaagugcaagguguccaacaaggcgcuccccgcccccaucgagaagaccaucagcaaggccaagggccagccgcgggagccccagguguacacccugccgcccucccgcgaggagaugacgaagaaccaggucagccugaccugccucgugaagggguucuaccccuccgacaucgccguggagugggagagcaacggccagcccgagaacaacuacaagaccaccccgcccguccuggacuccgacggcagcuucuuccuguacuccaagcucacgguggacaagagccgguggcagcaggggaacguguucuccugcagcgucaugcacgaggcccugcacaaccacuacacccagaagucccugagccucucccccggcaaguga

SEQ ID NO: 1785 - RNA, 1248 nt, Artificial Sequence
  MmEPO-MmIgG1_cds
augggcgugcccgagcggccgacccugcuccugcugcucagccugcugcucaucccccuggggcugcccguccucugcgcccccccgcgccugaucugcgacucccgggugcuggagcgcuacauccucgaggccaaggaggcggagaacgugaccaugggcugcgccgaggggccccggcugagcgagaacaucacgguccccgacaccaaggugaacuucuacgccuggaagcgcauggagguggaggagcaggccaucgaggucuggcagggccugucccuccugagcgaggccauccugcaggcgcaggcccuccuggccaacuccagccagcccccggagacacugcagcuccacaucgacaaggccaucuccgggcugcggagccugaccucccuccugcgcgugcugggcgcgcagaaggagcucaugagcccgcccgacacgacccccccggccccgcugcggacccugaccguggacacguucugcaagcuguuccgcgucuacgccaacuuccuccggggcaagcugaagcucuacaccggggaggugugccgccggggcgaccgcggcggcugcaagcccugcaucugcaccgugccggaggucagcuccguguucaucuucccgcccaagcccaaggacgugcugaccaucacgcucacccccaaggugaccugcgucguggucgacaucagcaaggacgaccccgaggugcaguucuccugguucguggacgacgucgaggugcacaccgcccagacgcagccccgcgaggagcaguucaacagcaccuuccgguccgugagcgagcugcccaucaugcaccaggacuggcugaacgggaaggaguucaagugccgcgucaacuccgccgcguucccggcccccaucgagaagaccaucagcaagaccaagggccggcccaaggcgccccagguguacacgaucccgccgcccaaggagcagauggccaaggacaaggugucccugaccugcaugaucaccgacuucuuccccgaggacaucaccgucgaguggcaguggaacgggcagcccgccgagaacuacaagaacacgcagcccaucauggacaccgacggcagcuacuucguguacuccaagcucaacgugcagaaguccaacugggaggccgggaacaccuucacgugcagcguccugcacgagggccuccacaaccaccacaccgagaagucccugagccacagccccggcaaguga

SEQ ID NO: 1786 - RNA, 1278 nt, Artificial Sequence
  MmEPO-MmIgG2_cds
augggcgugcccgagcggccgacccugcuccugcugcucagccugcugcucaucccccuggggcugcccguccucugcgcccccccgcgccugaucugcgacucccgggugcuggagcgcuacauccucgaggccaaggaggcggagaacgugaccaugggcugcgccgaggggccccggcugagcgagaacaucacgguccccgacaccaaggugaacuucuacgccuggaagcgcauggagguggaggagcaggccaucgaggucuggcagggccugucccuccugagcgaggccauccugcaggcgcaggcccuccuggccaacuccagccagcccccggagacacugcagcuccacaucgacaaggccaucuccgggcugcggagccugaccucccuccugcgcgugcugggcgcgcagaaggagcucaugagcccgcccgacacgacccccccggccccgcugcggacccugaccguggacacguucugcaagcuguuccgcgucuacgccaacuuccuccggggcaagcugaagcucuacaccggggaggugugccgccggggcgaccgcggcccccgcggcccgaccaucaagcccugcccgcccugcaagugccccgcccccaaccugcucgggggccccagcguguucaucuucccgcccaagaucaaggacguccugaugaucucccugagccccaucgugaccugcguggucguggacguguccgaggacgaccccgacguccagaucagcugguucgugaacaacguggagguccacacggcccagacccagacccaccgggaggacuacaacuccacccuccgcguggugagcgcccugcccauccagcaccaggacuggauguccgggaaggaguucaagugcaaggucaacaacaaggaccugccggcccccaucgagcggacgaucagcaagcccaagggcuccgugcgcgcgccccagguguacguccucccgccgcccgaggaggagaugaccaagaagcaggucacccugaccugcauggugacggacuucaugcccgaggacaucuacguggaguggaccaacaacgggaagaccgagcugaacuacaagaacaccgagcccgugcucgacagcgacggcuccuacuucauguacagcaagcugcggguggagaagaagaacugggucgagcgcaacuccuacagcugcuccguggugcacgagggccugcacaaccaccacacgaccaagagcuucucccggacccccgggaaguga

SEQ ID NO: 1787 - RNA, 2616 nt, Artificial Sequence
  MmEPO-Mmtf(20-697)_cds
augggcgugcccgagcggccgacccugcuccugcugcucagccugcugcucaucccccuggggcugcccguccucugcgcccccccgcgccugaucugcgacucccgggugcuggagcgcuacauccucgaggccaaggaggcggagaacgugaccaugggcugcgccgaggggccccggcugagcgagaacaucacgguccccgacaccaaggugaacuucuacgccuggaagcgcauggagguggaggagcaggccaucgaggucuggcagggccugucccuccugagcgaggccauccugcaggcgcaggcccuccuggccaacuccagccagcccccggagacacugcagcuccacaucgacaaggccaucuccgggcugcggagccugaccucccuccugcgcgugcugggcgcgcagaaggagcucaugagcccgcccgacacgacccccccggccccgcugcggacccugaccguggacacguucugcaagcuguuccgcgucuacgccaacuuccuccggggcaagcugaagcucuacaccggggaggugugccgccggggcgaccgcggcgugcccgacaagaccgucaaguggugcgccgugagcgagcacgagaacaccaagugcaucuccuuccgcgaccacaugaagacggugcugccgcccgacggcccccggcucgccugcgucaagaagaccagcuaccccgacugcaucaaggcgaucuccgccagcgaggccgacgccaugacccuggacgggggcuggguguacgacgccgggcugaccccgaacaaccucaagcccguggcggccgaguucuacggcuccgucgagcacccccagacguacuacuacgccguggccguggucaagaaggggaccgacuuccagcugaaccagcuggagggcaagaaguccugccacaccggccucgggcgcuccgcgggcugggugauccccaucgggcugcuguucugcaagcucagcgagccgcggagcccccuggagaaggccgugagcuccuucuucagcggcuccugcguccccugcgccgaccccguggccuucccgaagcugugccagcucugccccgggugcggcugcagcuccacccagcccuucuucggcuacgugggggccuucaagugccugaaggacggcgggggcgacgucgcguucgugaagcacacgaccaucuucgaggugcugcccgagaaggccgaccgcgaccaguacgagcuccugugccuggacaacacccggaagccggucgaccaguacgaggacugcuaccucgcccgcauccccagccacgccgugguggcccggaagaacaacggcaaggaggaccugaucugggagauccugaaggucgcgcaggagcacuucgggaagggcaaguccaaggacuuccagcuguucagcagcccccuggggaaggaccuccucuucaaggacuccgccuucggccugcugcgcgugcccccgcggauggacuaccgccucuaccuggggcacaacuacgugaccgccauccggaaccagcaggagggcgucugccccgagggcagcaucgacaacucccccgugaaguggugcgcccugagccaccucgagcgcacgaagugcgacgagugguccaucaucagcgaggggaagaucgagugcgaguccgccgagaccaccgaggacugcaucgagaagaucgucaacggcgaggcggacgccaugacccuggacgggggccacgccuacaucgccgggcagugcggccuggugcccgugauggccgaguacuacgagagcuccaacugcgcgaucccgagccagcagggcaucuuccccaagggguacuacgccgucgccguggugaaggccuccgacacgagcaucaccuggaacaaccucaagggcaagaaguccugccacaccggggucgaccggaccgcgggcuggaacauccccauggggaugcuguacaaccgcaucaaccacugcaaguucgacgaguucuucagccagggcugcgcccccggcuacgagaagaacuccacgcugugcgaccucugcaucgggccgcugaagugcgcccccaacaacaaggaggaguacaacggcuacaccggggccuuccggugccugguggagaagggcgacguggccuucgucaagcaccagaccgugcucgacaacaccgagggcaagaaccccgcggagugggccaagaaccugaagcaggaggacuucgagcugcucugcccggacgggacgcgcaagcccgugaaggacuucgccagcugccaccuggcccaggcccccaaccacgucguggugucccggaaggagaaggcggcccgcgucaaggccgugcugaccagccaggagacccucuucggcggguccgacugcaccggcaacuucugccuguucaagagcacgaccaaggaccuccuguuccgggacgacaccaagugcuucgugaagcugcccgaggggaccacgccggagaaguaccugggcgccgaguacaugcaguccgucggcaacaugcgcaagugcagcaccagccggcugcucgaggccugcaccuuccacaagcacuga

SEQ ID NO: 1788 - RNA, 2619 nt, Artificial Sequence
  MmEPO-Hstf(20-698)_cds
augggcgugcccgagcggccgacccugcuccugcugcucagccugcugcucaucccccuggggcugcccguccucugcgcccccccgcgccugaucugcgacucccgggugcuggagcgcuacauccucgaggccaaggaggcggagaacgugaccaugggcugcgccgaggggccccggcugagcgagaacaucacgguccccgacaccaaggugaacuucuacgccuggaagcgcauggagguggaggagcaggccaucgaggucuggcagggccugucccuccugagcgaggccauccugcaggcgcaggcccuccuggccaacuccagccagcccccggagacacugcagcuccacaucgacaaggccaucuccgggcugcggagccugaccucccuccugcgcgugcugggcgcgcagaaggagcucaugagcccgcccgacacgacccccccggccccgcugcggacccugaccguggacacguucugcaagcuguuccgcgucuacgccaacuuccuccggggcaagcugaagcucuacaccggggaggugugccgccggggcgaccgcggcgugcccgacaagaccguccgcuggugcgccgugagcgagcacgaggccaccaagugccaguccuuccgggaccacaugaaguccgugaucccguccgacggccccagcgucgcgugcgugaagaaggccuccuaccuggacugcauccgcgccaucgccgccaacgaggcggacgccgugacgcucgacgccgggcuggucuacgacgccuaccuggcgcccaacaaccucaagcccgugguggccgaguucuacggcagcaaggaggacccgcagaccuucuacuacgccgucgccguggugaagaaggacuccggguuccagaugaaccagcugcggggcaagaaguccugccacaccgggcugggccgcagcgccggcuggaacauccccaucgggcuccuguacugcgaccugcccgagccccggaagccgcucgagaaggcggucgccaacuucuucagcggcuccugcgcccccugcgccgacgggaccgacuucccccagcugugccagcugugccccggcugcgggugcagcacgcucaaccaguacuucggcuacuccggcgccuucaagugccugaaggacggggcgggcgacguggccuucgugaagcacagcaccaucuucgagaaccuggccaacaaggccgaccgcgaccaguacgagcuccugugccuggacaacacccggaagccggucgacgaguacaaggacugccaccucgcccaggugcccucccacaccguggucgcgcgcagcaugggcggcaaggaggaccugaucugggagcugcucaaccaggcccaggagcacuucggcaaggacaaguccaaggaguuccagcuguucagcagcccccacgggaaggaccuccuguucaaggacagcgcccacggcuuccugaaggugcccccgcggauggacgccaagauguaccugggguacgaguacgugacggccauccgcaaccuccgggaggggaccugccccgaggcgcccaccgacgagugcaagcccgucaaguggugcgcccugagccaccacgagcgccugaagugcgacgagugguccgugaacagcguggggaagaucgagugcgucuccgccgagaccacggaggacugcaucgccaagaucaugaacggcgaggcggacgccaugagccucgacggcggguucguguacaucgccggcaagugcgggcuggucccggugcuggccgagaacuacaacaaguccgacaacugcgaggacacccccgaggccggcuacuucgcgguggccgucgugaagaaguccgccagcgaccucaccugggacaaccugaaggggaagaaguccugccacaccgccgugggccggacggccggcuggaacauccccauggggcugcucuacaacaagaucaaccacugccgcuucgacgaguucuucagcgagggcugcgcgcccgggagcaagaaggacuccagccugugcaagcugugcaugggcuccgggcucaaccugugcgagccgaacaacaaggagggcuacuacggcuacaccggggccuuccggugccuggucgagaagggcgacguggccuucgugaagcaccagaccgucccccagaacaccgggggcaagaaccccgaccccugggccaagaaccucaacgagaaggacuacgagcugcugugccucgacggcacgcgcaagccgguggaggaguacgccaacugccaccuggcgcgggcccccaaccacgccguggucacccgcaaggacaaggaggccugcgugcacaagauccugcggcagcagcagcaccucuucgggagcaacgugaccgacugcuccggcaacuucugccuguuccgcagcgagaccaaggaccugcuguuccgggacgacacggucugccucgcgaagcugcacgaccgcaacaccuacgagaaguaccugggggaggaguacgugaaggccgugggcaaccuccgcaagugcuccaccagcucccugcuggaggccugcaccuuccggcgccccuga

SEQ ID NO: 1789 - RNA, 759 nt, Artificial Sequence
  MmEPO-Sa_SpA (121-270)_cds
augggcgugcccgagcggccgacccugcuccugcugcucagccugcugcucaucccccuggggcugcccguccucugcgcccccccgcgccugaucugcgacucccgggugcuggagcgcuacauccucgaggccaaggaggcggagaacgugaccaugggcugcgccgaggggccccggcugagcgagaacaucacgguccccgacaccaaggugaacuucuacgccuggaagcgcauggagguggaggagcaggccaucgaggucuggcagggccugucccuccugagcgaggccauccugcaggcgcaggcccuccuggccaacuccagccagcccccggagacacugcagcuccacaucgacaaggccaucuccgggcugcggagccugaccucccuccugcgcgugcugggcgcgcagaaggagcucaugagcccgcccgacacgacccccccggccccgcugcggacccugaccguggacacguucugcaagcuguuccgcgucuacgccaacuuccuccggggcaagcugaagcucuacaccggggaggugugccgccggggcgaccgcggcgccgacaacaaguucaacaaggagcagcagaacgccuucuacgagauccugcaccuccccaaccugaacgaggagcagcgcaacggcuucauccagagccugaaggacgacccgucccagagcgcgaaccuccuggccgaggccaagaagcugaacgacgcccaggcccccaaggcguga

SEQ ID NO: 1790 - RNA, 1263 nt, Artificial Sequence
  MmEPO-Hs_monoIgG1_cds
augggcgugcccgagcggccgacccugcuccugcugcucagccugcugcucaucccccuggggcugcccguccucugcgcccccccgcgccugaucugcgacucccgggugcuggagcgcuacauccucgaggccaaggaggcggagaacgugaccaugggcugcgccgaggggccccggcugagcgagaacaucacgguccccgacaccaaggugaacuucuacgccuggaagcgcauggagguggaggagcaggccaucgaggucuggcagggccugucccuccugagcgaggccauccugcaggcgcaggcccuccuggccaacuccagccagcccccggagacacugcagcuccacaucgacaaggccaucuccgggcugcggagccugaccucccuccugcgcgugcugggcgcgcagaaggagcucaugagcccgcccgacacgacccccccggccccgcugcggacccugaccguggacacguucugcaagcuguuccgcgucuacgccaacuuccuccggggcaagcugaagcucuacaccggggaggugugccgccggggcgaccgcggcgacaagacccacaccagcccgcccucccccgcccccgagcugcucggcgggcccagcguguuccuguucccgcccaagcccaaggacacgcugaugaucucccgcacccccgaggugaccugcgucguggucgacgugagccacgaggacccggaggugaaguucaacugguacgucgacggcguggaggugcacaacgccaagaccaagccccgggaggagcaguacaacuccacguaccgcgucgugagcgugcucaccguccugcaccaggacuggcugaacgggaaggaguacaagugcaagguguccaacaaggcgcuccccgcccccaucgagaagaccaucagcaaggccaagggccagccgcgggagccccagguguacacccugccgcccucccgcgaggagaugacgaagaaccaggucaaccugaccugccucgugaagggguucuaccccagcgacaucgccguggagugggaguccaacggccagcccgagaacaacuacaagaccaccccgcccguccuggacagcgacggcuccuucuuccugaacagcacgcucaccguggacaagucccgguggcagcaggggaacguguucagcugcuccgucaugcacgaggcccugcacaaccacuacacccagaagucccugagccucagccccggcaaguga

SEQ ID NO: 1791 - RNA, 1944 nt, Artificial Sequence
  MmEPO-Hs_2x-monoIgG1_cds
augggcgugcccgagcggccgacccugcuccugcugcucagccugcugcucaucccccuggggcugcccguccucugcgcccccccgcgccugaucugcgacucccgggugcuggagcgcuacauccucgaggccaaggaggcggagaacgugaccaugggcugcgccgaggggccccggcugagcgagaacaucacgguccccgacaccaaggugaacuucuacgccuggaagcgcauggagguggaggagcaggccaucgaggucuggcagggccugucccuccugagcgaggccauccugcaggcgcaggcccuccuggccaacuccagccagcccccggagacacugcagcuccacaucgacaaggccaucuccgggcugcggagccugaccucccuccugcgcgugcugggcgcgcagaaggagcucaugagcccgcccgacacgacccccccggccccgcugcggacccugaccguggacacguucugcaagcuguuccgcgucuacgccaacuuccuccggggcaagcugaagcucuacaccggggaggugugccgccggggcgaccgcggcgacaagacccacaccagcccgcccucccccgcccccgagcugcucggcgggcccagcguguuccuguucccgcccaagcccaaggacacgcugaugaucucccgcacccccgaggugaccugcgucguggucgacgugagccacgaggacccggaggugaaguucaacugguacgucgacggcguggaggugcacaacgccaagaccaagccccgggaggagcaguacaacuccacguaccgcgucgugagcgugcucaccguccugcaccaggacuggcugaacgggaaggaguacaagugcaagguguccaacaaggcgcuccccgcccccaucgagaagaccaucagcaaggccaagggccagccgcgggagccccagguguacacccugccgcccucccgcgaggagaugacgaagaaccaggucaaccugaccugccucgugaagggguucuaccccagcgacaucgccguggagugggaguccaacggccagcccgagaacaacuacaagaccaccccgcccguccuggacagcgacggcuccuucuuccugaacagcacgcucaccguggacaagucccgguggcagcaggggaacguguucagcugcuccgucaugcacgaggcccugcacaaccacuacacccagaagucccugagccucagccccggcaaggacaagacccacacgagcccgcccucccccgcgcccgagcugcucgggggccccagcguguuccuguucccgcccaagcccaaggacacccugaugaucucccgcacccccgaggugaccugcgucguggucgacgugagccacgaggaccccgaggugaaguucaacugguacgucgacgggguggaggugcacaacgccaagacgaagccgcgggaggagcaguacaacuccaccuaccgcgucgugagcgugcugaccguccuccaccaggacuggcugaacggcaaggaguacaagugcaagguguccaacaaggcccugcccgcccccaucgagaagaccaucagcaaggcgaagggccagccccgggagccccagguguacacgcucccgcccucccgcgaggagaugaccaagaaccaggucaaccugaccugccuggugaagggguucuaccccagcgacaucgccguggagugggaguccaacggccagcccgagaacaacuacaagaccacgccgcccguccucgacagcgacggguccuucuuccugaacagcacccugaccguggacaagucccgguggcagcagggcaacguguucagcugcuccgucaugcacgaggcccuccacaaccacuacacccagaagucccugagccugagccccggcaaguga

SEQ ID NO: 1792 - RNA, 756 nt, Artificial Sequence
  MmEPO-IgBD_cds
augggcgugcccgagcggccgacccugcuccugcugcucagccugcugcucaucccccuggggcugcccguccucugcgcccccccgcgccugaucugcgacucccgggugcuggagcgcuacauccucgaggccaaggaggcggagaacgugaccaugggcugcgccgaggggccccggcugagcgagaacaucacgguccccgacaccaaggugaacuucuacgccuggaagcgcauggagguggaggagcaggccaucgaggucuggcagggccugucccuccugagcgaggccauccugcaggcgcaggcccuccuggccaacuccagccagcccccggagacacugcagcuccacaucgacaaggccaucuccgggcugcggagccugaccucccuccugcgcgugcugggcgcgcagaaggagcucaugagcccgcccgacacgacccccccggccccgcugcggacccugaccguggacacguucugcaagcuguuccgcgucuacgccaacuuccuccggggcaagcugaagcucuacaccggggaggugugccgccggggcgaccgcggcguggacgccaaguacgccaaggagcaggacgcggccgcccacgagauccgcuggcugcccaaccucaccuucgaccagcgggucgccuucauccacaagcuggccgacgacccgagccaguccagcgagcugcucuccgaggcgaagaagcugaacgacagccaggcccccaaguga

SEQ ID NO: 1793 - RNA, 636 nt, Artificial Sequence
  MmEPO-linkerG4S-IgBP_cds
augggcgugcccgagcggccgacccugcuccugcugcucagccugcugcucaucccccuggggcugcccguccucugcgcccccccgcgccugaucugcgacucccgggugcuggagcgcuacauccucgaggccaaggaggcggagaacgugaccaugggcugcgccgaggggccccggcugagcgagaacaucacgguccccgacaccaaggugaacuucuacgccuggaagcgcauggagguggaggagcaggccaucgaggucuggcagggccugucccuccugagcgaggccauccugcaggcgcaggcccuccuggccaacuccagccagcccccggagacacugcagcuccacaucgacaaggccaucuccgggcugcggagccugaccucccuccugcgcgugcugggcgcgcagaaggagcucaugagcccgcccgacacgacccccccggccccgcugcggacccugaccguggacacguucugcaagcuguuccgcgucuacgccaacuuccuccggggcaagcugaagcucuacaccggggaggugugccgccggggcgaccgcggcggcgggggcggcuccgacugcgccuggcaccugggcgagcucguguggugcaccuga

SEQ ID NO: 1794 - RNA, 3297 nt, Artificial Sequence
  MmEPO-E-XtEN_cds
augggcgugcccgagcggccgacccugcuccugcugcucagccugcugcucaucccccuggggcugcccguccucugcgcccccccgcgccugaucugcgacucccgggugcuggagcgcuacauccucgaggccaaggaggcggagaacgugaccaugggcugcgccgaggggccccggcugagcgagaacaucacgguccccgacaccaaggugaacuucuacgccuggaagcgcauggagguggaggagcaggccaucgaggucuggcagggccugucccuccugagcgaggccauccugcaggcgcaggcccuccuggccaacuccagccagcccccggagacacugcagcuccacaucgacaaggccaucuccgggcugcggagccugaccucccuccugcgcgugcugggcgcgcagaaggagcucaugagcccgcccgacacgacccccccggccccgcugcggacccugaccguggacacguucugcaagcuguuccgcgucuacgccaacuuccuccggggcaagcugaagcucuacaccggggaggugugccgccggggcgaccgcggccacggcgaggggaccuucaccagcgaccuguccaagcagauggaggaggaggccgugcgccucuucaucgaguggcugaagaacggcgggcccagcuccggcgccccgccccccagcgggggcucccccgcgggcagcccgacguccaccgaggaggggaccagcgaguccgccacccccgagagcggccccgggacguccaccgagcccagcgagggcuccgccccggggagccccgccggcucccccaccagcaccgaggagggcacguccaccgagcccagcgagggguccgccccgggcaccagcaccgagcccagcgagggguccgcgcccggcacgagcgaguccgccacccccgagagcggcccgggguccgagcccgccaccagcggcuccgagacccccgggagcgagcccgccacguccggcagcgagaccccggggucccccgcgggcagccccaccuccaccgaggagggcacgagcgaguccgccacccccgagagcgggccgggcaccuccaccgagcccagcgagggguccgcccccggcacgagcaccgagcccagcgagggguccgccccgggcagccccgccggcucccccaccagcaccgaggaggggacguccaccgagccgagcgagggcuccgcgcccgggaccagcaccgagcccuccgagggcagcgcccccgggacguccgagagcgccaccccggaguccggccccggcaccagcaccgagcccuccgaggggagcgcccccggcacguccgagagcgccaccccggagagcgggcccggcuccgagcccgcgaccagcggcuccgagacccccgggaccagcacggagccguccgagggcagcgcccccgggaccuccaccgagcccagcgagggcuccgcccccgggaccagcgaguccgccacgccggagagcggccccggcaccuccgagagcgccacccccgaguccgggcccggcagcccggcggggucccccaccagcacggaggagggcaccuccgagagcgccacccccgagagcgggcccggcuccgagccggccaccagcggcuccgagacgcccgggaccagcgaguccgccacccccgagagcggcccggggaccuccacggagcccagcgagggcuccgcccccgggaccagcaccgagcccuccgagggcagcgcgccgggcaccuccacggagcccagcgagggguccgcccccggcaccagcaccgagcccuccgaggggagcgccccgggcaccuccacggagcccagcgaggggagcgcccccggcaccuccaccgagcccagcgagggcuccgcgccggggagccccgccggcucccccaccagcacggaggaggggaccuccaccgagcccagcgagggcuccgccccgggcaccagcgaguccgccacgcccgagagcgggcccggcuccgagcccgccaccagcggguccgagaccccgggcaccagcgaguccgcgacgcccgagagcgggcccggcuccgagcccgccaccagcggcagcgagaccccggggaccuccgagagcgccacccccgaguccggccccgggacgagcaccgagcccuccgagggcagcgccccggggaccuccgagagcgccacccccgaguccggccccggcagcccggcggggucccccacgagcaccgaggagggcucccccgccgggagccccaccuccaccgaggagggcagcccggccgggucccccacgagcaccgaggagggcaccuccgagagcgccacccccgagagcggccccgggacguccaccgagccgagcgagggcuccgcccccgggaccagcgaguccgcgacccccgagagcggccccggcuccgagccggccacgagcggguccgagacccccggcaccagcgaguccgccacccccgagagcgggcccggcuccgagccggccacgagcggguccgagacccccggcaccagcgaguccgcgacccccgagagcggccccgggacguccaccgagccgagcgagggcagcgcccccgggucccccgccggcagccccaccuccaccgaggaggggacgagcgaguccgccaccccggagagcggccccggcuccgagcccgccaccagcggguccgagacccccggcacgagcgaguccgcgaccccggagagcgggcccggcucccccgccgggagcccgaccuccaccgaggagggcagccccgccggcucccccacgagcaccgaggaggggaccagcaccgagcccuccgagggcagcgccccggggaccuccgagagcgccacgcccgaguccggccccgggaccagcgaguccgcgacccccgagagcggcccgggcaccuccgagagcgccacgcccgaguccgggcccggcagcgagcccgccaccuccgggagcgagaccccgggcuccgagcccgccaccagcggcuccgagacgcccgggagccccgccggcuccccgaccagcaccgaggaggggaccagcacggagcccuccgagggcagcgcgcccgggaccuccaccgagcccagcgagggcuccgccccgggcagcgagcccgccaccuccgggagcgagacgcccggcaccuccgagagcgccacccccgaguccgggccgggcaccagcacggagcccuccgaggggagcgcgcccggcuga

SEQ ID NO: 1795 - RNA, 1842 nt, Artificial Sequence
  MmEPO-ELP(420)_cds
augggcgugcccgagcggccgacccugcuccugcugcucagccugcugcucaucccccuggggcugcccguccucugcgcccccccgcgccugaucugcgacucccgggugcuggagcgcuacauccucgaggccaaggaggcggagaacgugaccaugggcugcgccgaggggccccggcugagcgagaacaucacgguccccgacaccaaggugaacuucuacgccuggaagcgcauggagguggaggagcaggccaucgaggucuggcagggccugucccuccugagcgaggccauccugcaggcgcaggcccuccuggccaacuccagccagcccccggagacacugcagcuccacaucgacaaggccaucuccgggcugcggagccugaccucccuccugcgcgugcugggcgcgcagaaggagcucaugagcccgcccgacacgacccccccggccccgcugcggacccugaccguggacacguucugcaagcuguuccgcgucuacgccaacuuccuccggggcaagcugaagcucuacaccggggaggugugccgccggggcgaccgcggcguuggaguuccuggcguggguguuccagguguuggagugccaggugucggcgucccaggcgugggagugcccggcguuggugucccuggugucgguguuccuggcgucggagucccugguguuggcguccccgguguuggagucccaggcguugguguuccuggcguuggcgugcccggcgugggaguuccuggcguuggaguuccuggcgucggagugccaggcguuggaguccccggcgugggcgucccaggcgucggaguuccaggugucgguguucccggugucggaguuccaggcgugggugucccuggcguggguguccccggugucggcgugcccggcguuggcguucccgguguuggcguucccggcgucgguguccccggcguuggagugccugguguuggugucccuggcgugggaguuccaggcgugggcguucccggcgucgguguuccuggugucggcgucccaggcguuggaguuccuggcgugggaguccccggugucggaguuccugguguuggagugcccggcgucgguguuccaggcgugggaguuccaggcgucggagucccagguguuggagugccaggcgugggagugccuggugucggaguuccaggcguuggcgugccaggcguugguguucccggugucggaguccccgguguugguguucccggcguuggagugccuggcgugggcguucccggcguuggagucccaggugucggagucccuggcgucggcguuccaggugucggagugccuggcguugguguucccggcgucggcguuccagguguugguguccccgguguuggugucccugguguuggcgugccaggugucgguguuccugguguugguguuccuggugucgguguuccagguguuggcguucccggcgugggcgugccagguguuggagucccuggcgucggugucccaggcgucggugucccugguguuggagucccuggcguuggcguccccggcgucggugucccuggugucggagugcccggugucggagucccuggugucggcgugcccggcgugggugucccaggcguugguguucccggcguggguguucccggcguuggcgugccaggcgucggcgugccaggugucggugucccaggugucgguguuccaggugucggugucccuggcguuggcgugccaggcguuggagugccaggcgucggugucccagguguugguguuccugguguuggagucccaggauga

SEQ ID NO: 1796 - RNA, 735 nt, Artificial Sequence
  MmEPO-linker4GS-ABP SA15_cds
augggcgugcccgagcggccgacccugcuccugcugcucagccugcugcucaucccccuggggcugcccguccucugcgcccccccgcgccugaucugcgacucccgggugcuggagcgcuacauccucgaggccaaggaggcggagaacgugaccaugggcugcgccgaggggccccggcugagcgagaacaucacgguccccgacaccaaggugaacuucuacgccuggaagcgcauggagguggaggagcaggccaucgaggucuggcagggccugucccuccugagcgaggccauccugcaggcgcaggcccuccuggccaacuccagccagcccccggagacacugcagcuccacaucgacaaggccaucuccgggcugcggagccugaccucccuccugcgcgugcugggcgcgcagaaggagcucaugagcccgcccgacacgacccccccggccccgcugcggacccugaccguggacacguucugcaagcuguuccgcgucuacgccaacuuccuccggggcaagcugaagcucuacaccggggaggugugccgccggggcgaccgcggcggcgggggcggcucccuggccgaggccaaggugcucgcgaaccgcgagcuggacaaguacggcgucagcgacuacuacaagaaccugaucaacaacgccaagaccguggagggggugaaggcccucaucgacgagauccuggccgcccugcccuga

SEQ ID NO: 1797 - RNA, 735 nt, Artificial Sequence; identical to SEQ ID NO: 1796
  MmEPO-linkerG4S-ABD SPG_cds

SEQ ID NO: 1798 - RNA, 1215 nt, Artificial Sequence
  MmEPO-linker4GS-HsAlbDIII (P02768  404-609)_cds
augggcgugcccgagcggccgacccugcuccugcugcucagccugcugcucaucccccuggggcugcccguccucugcgcccccccgcgccugaucugcgacucccgggugcuggagcgcuacauccucgaggccaaggaggcggagaacgugaccaugggcugcgccgaggggccccggcugagcgagaacaucacgguccccgacaccaaggugaacuucuacgccuggaagcgcauggagguggaggagcaggccaucgaggucuggcagggccugucccuccugagcgaggccauccugcaggcgcaggcccuccuggccaacuccagccagcccccggagacacugcagcuccacaucgacaaggccaucuccgggcugcggagccugaccucccuccugcgcgugcugggcgcgcagaaggagcucaugagcccgcccgacacgacccccccggccccgcugcggacccugaccguggacacguucugcaagcuguuccgcgucuacgccaacuuccuccggggcaagcugaagcucuacaccggggaggugugccgccggggcgaccgcggcggcgggggcggcucccugguggaggagccccagaaccucaucaagcagaacugcgagcuguucgagcagcugggcgaguacaaguuccagaacgcccuccugguccgcuacaccaagaaggugccgcaggugagcacccccacgcuggucgaggugucccggaaccucgggaaggugggcagcaagugcugcaagcaccccgaggccaagcgcaugcccugcgcggaggacuaccuguccgucgugcugaaccagcucugcgugcugcacgagaagaccccggucagcgaccgggugaccaagugcugcaccgagucccuggugaaccgccggcccugcuucagcgcccucgaggucgacgagacguacgugcccaaggaguucaacgccgagaccuucaccuuccacgccgacaucugcacccuguccgagaaggagcgccagaucaagaagcagacggcccugguggagcucgucaagcacaagcccaaggcgaccaaggagcagcugaaggccgugauggacgacuucgccgccuucguggagaagugcugcaaggcggacgacaaggagaccugcuucgccgaggaggggaagaagcuggucgccgccagccaggccgcgcucggccuguga

SEQ ID NO: 1799 - RNA, 1248 nt, Artificial Sequence
  MmEPO-monomeric-MmFc_cds
augggcgugcccgagcggccgacccugcuccugcugcucagccugcugcucaucccccuggggcugcccguccucugcgcccccccgcgccugaucugcgacucccgggugcuggagcgcuacauccucgaggccaaggaggcggagaacgugaccaugggcugcgccgaggggccccggcugagcgagaacaucacgguccccgacaccaaggugaacuucuacgccuggaagcgcauggagguggaggagcaggccaucgaggucuggcagggccugucccuccugagcgaggccauccugcaggcgcaggcccuccuggccaacuccagccagcccccggagacacugcagcuccacaucgacaaggccaucuccgggcugcggagccugaccucccuccugcgcgugcugggcgcgcagaaggagcucaugagcccgcccgacacgacccccccggccccgcugcggacccugaccguggacacguucugcaagcuguuccgcgucuacgccaacuuccuccggggcaagcugaagcucuacaccggggaggugugccgccggggcgaccgcggcggcagcaagcccuccaucagcaccgugccggaggucuccagcguguucaucuucccccccaagcccaaggacgugcugaccaucacgcucaccccgaaggucaccugcgugguggucgacaucuccaaggacgaccccgaggugcaguucagcugguucguggacgacgucgaggugcacaccgcccagacgcagccccgcgaggagcaguucaacuccaccuuccggagcguguccgagcugcccaucaugcaccaggacuggcugaacgggaaggaguucaagugccgcgucaacagcgccgcguucccggcccccaucgagaagaccaucuccaagaccaagggccggcccaaggccccccagguguacacgaucccgccccccaaggagcagauggccaaggacaaggugaaccucaccugcaugaucaccgacuucuuccccgaggacaucaccgucgaguggcaguggaacgggcagccggccgagaacuacaagaacacgcagcccaucauggacaccgacggcagcuacuucgugaacuccacccugaacgugcagaagagcaacugggaggcggggaacaccuucacgugcuccguccugcacgagggccuccacaaccaccacaccgagaagagccugucccacagccccggcaaguga

SEQ ID NO: 1800 - RNA, 1914 nt, Artificial Sequence
  MmEPO-tandem monomeric MmFc_cds
augggcgugcccgagcggccgacccugcuccugcugcucagccugcugcucaucccccuggggcugcccguccucugcgcccccccgcgccugaucugcgacucccgggugcuggagcgcuacauccucgaggccaaggaggcggagaacgugaccaugggcugcgccgaggggccccggcugagcgagaacaucacgguccccgacaccaaggugaacuucuacgccuggaagcgcauggagguggaggagcaggccaucgaggucuggcagggccugucccuccugagcgaggccauccugcaggcgcaggcccuccuggccaacuccagccagcccccggagacacugcagcuccacaucgacaaggccaucuccgggcugcggagccugaccucccuccugcgcgugcugggcgcgcagaaggagcucaugagcccgcccgacacgacccccccggccccgcugcggacccugaccguggacacguucugcaagcuguuccgcgucuacgccaacuuccuccggggcaagcugaagcucuacaccggggaggugugccgccggggcgaccgcggcggcagcaagcccuccaucagcaccgugccggaggucuccagcguguucaucuucccccccaagcccaaggacgugcugaccaucacgcucaccccgaaggucaccugcgugguggucgacaucuccaaggacgaccccgaggugcaguucagcugguucguggacgacgucgaggugcacaccgcccagacgcagccccgcgaggagcaguucaacuccaccuuccggagcguguccgagcugcccaucaugcaccaggacuggcugaacgggaaggaguucaagugccgcgucaacagcgccgcguucccggcccccaucgagaagaccaucuccaagaccaagggccggcccaaggccccccagguguacacgaucccgccccccaaggagcagauggccaaggacaaggugaaccucaccugcaugaucaccgacuucuuccccgaggacaucaccgucgaguggcaguggaacgggcagccggccgagaacuacaagaacacgcagcccaucauggacaccgacggcagcuacuucgugaacuccacccugaacgugcagaagagcaacugggaggcggggaacaccuucacgugcuccguccugcacgagggccuccacaaccaccacaccgagaagagccugucccacagccccggcaagggguccaagcccagcaucagcaccgugccggagguguccagcgucuucaucuucccccccaagcccaaggacgugcugaccaucacgcucaccccgaaggugaccugcgucguggucgacaucuccaaggacgaccccgaggugcaguucagcugguucguggacgacgucgaggugcacaccgcccagacgcagccccgcgaggagcaguucaacuccaccuuccggagcguguccgagcugcccaucaugcaccaggacuggcugaacggcaaggaguucaagugccgcgucaacagcgccgccuucccggcgcccaucgagaagaccaucuccaagaccaaggggcggcccaaggccccgcagguguacacgauccccccccccaaggagcagauggccaaggacaaggugaaccucaccugcaugaucaccgacuucuucccggaggacaucaccgucgaguggcaguggaacggccagcccgccgagaacuacaagaacacgcagcccaucauggacaccgacgggagcuacuucgugaacuccacccugaacgugcagaagagcaacugggaggccggcaacaccuucacgugcuccguccugcacgagggccuccacaaccaccacaccgagaagagccugucccacagccccgggaaguga

SEQ ID NO: 1801 - RNA, 1251 nt, Artificial Sequence
  MmEPO-HsIgG2_cds
augggcgugcccgagcggccgacccugcuccugcugcucagccugcugcucaucccccuggggcugcccguccucugcgcccccccgcgccugaucugcgacucccgggugcuggagcgcuacauccucgaggccaaggaggcggagaacgugaccaugggcugcgccgaggggccccggcugagcgagaacaucacgguccccgacaccaaggugaacuucuacgccuggaagcgcauggagguggaggagcaggccaucgaggucuggcagggccugucccuccugagcgaggccauccugcaggcgcaggcccuccuggccaacuccagccagcccccggagacacugcagcuccacaucgacaaggccaucuccgggcugcggagccugaccucccuccugcgcgugcugggcgcgcagaaggagcucaugagcccgcccgacacgacccccccggccccgcugcggacccugaccguggacacguucugcaagcuguuccgcgucuacgccaacuuccuccggggcaagcugaagcucuacaccggggaggugugccgccggggcgaccgcggcguggagugccccccgugccccgccccccccgucgccggcccgagcguguuccuguucccccccaagcccaaggacacccucaugaucucccgcaccccggaggugacgugcgucgugguggacgucagccacgaggaccccgaggugcaguucaacugguacguggacgggauggagguccacaacgcgaagaccaagccccgggaggagcaguucaacuccaccuuccgcguggugagcguccugaccguggugcaccaggacuggcugaacggcaaggaguacaagugcaaggucuccaacaaggggcuccccgccccgaucgagaagacgaucagcaagaccaagggccagccccgggagccccagguguacacccugcccccgucccgcgaggagaugaccaagaaccaggugagccugacgugccucgucaagggguucuaccccuccgacaucgccguggagugggagagcaacggccagcccgagaacaacuacaagaccacccccccgaugcuggacuccgacggcagcuucuuccuguacuccaagcucaccguggacaagagccgguggcagcaggggaacgucuucuccugcagcgugaugcacgaggcccugcacaaccacuacacgcagaagucccugagccucucccccggcaaguga

SEQ ID NO: 1802 - RNA, 1296 nt, Artificial Sequence
  MmEPO-MmIgG2b_cds
augggcgugcccgagcggccgacccugcuccugcugcucagccugcugcucaucccccuggggcugcccguccucugcgcccccccgcgccugaucugcgacucccgggugcuggagcgcuacauccucgaggccaaggaggcggagaacgugaccaugggcugcgccgaggggccccggcugagcgagaacaucacgguccccgacaccaaggugaacuucuacgccuggaagcgcauggagguggaggagcaggccaucgaggucuggcagggccugucccuccugagcgaggccauccugcaggcgcaggcccuccuggccaacuccagccagcccccggagacacugcagcuccacaucgacaaggccaucuccgggcugcggagccugaccucccuccugcgcgugcugggcgcgcagaaggagcucaugagcccgcccgacacgacccccccggccccgcugcggacccugaccguggacacguucugcaagcuguuccgcgucuacgccaacuuccuccggggcaagcugaagcucuacaccggggaggugugccgccggggcgaccgcggccccagcggcccgaucuccaccaucaaccccugcccccccugcaaggagugccacaagugcccggcccccaaccuggaggggggccccagcguguucaucuuccccccgaacaucaaggacguccucaugaucucccugacccccaaggugacgugcguggucguggacgugagcgaggacgaccccgacguccagaucuccugguucgugaacaacguggagguccacaccgcccagacccagacccaccgcgaggacuacaacagcacgauccgggugguguccacccugcccauccagcaccaggacuggaugagcgggaaggaguucaagugcaaggucaacaacaaggaccucccgucccccaucgagcgcaccaucagcaagaucaagggccuggugcgggcgccccagguguacauccugcccccgcccgccgagcagcucucccgcaaggacgucagccugaccugccugguggugggguucaaccccggcgacaucuccgucgaguggacgagcaacggccacaccgaggagaacuacaaggacaccgcccccgugcucgacuccgacgggagcuacuucaucuacuccaagcuggacaucaagaccagcaagugggagaagacggacuccuucagcugcaacgugcggcacgagggccugaagaacuacuaccucaagaagaccaucagccgcuccccggggaaguga

SEQ ID NO: 1803 - RNA, 1254 nt, Artificial Sequence
  MmEPO-HsIgG4_cds
augggcgugcccgagcggccgacccugcuccugcugcucagccugcugcucaucccccuggggcugcccguccucugcgcccccccgcgccugaucugcgacucccgggugcuggagcgcuacauccucgaggccaaggaggcggagaacgugaccaugggcugcgccgaggggccccggcugagcgagaacaucacgguccccgacaccaaggugaacuucuacgccuggaagcgcauggagguggaggagcaggccaucgaggucuggcagggccugucccuccugagcgaggccauccugcaggcgcaggcccuccuggccaacuccagccagcccccggagacacugcagcuccacaucgacaaggccaucuccgggcugcggagccugaccucccuccugcgcgugcugggcgcgcagaaggagcucaugagcccgcccgacacgacccccccggccccgcugcggacccugaccguggacacguucugcaagcuguuccgcgucuacgccaacuuccuccggggcaagcugaagcucuacaccggggaggugugccgccggggcgaccgcggccccccgugccccagcugccccgcccccgaguuccugggcgggccguccguguuccucuucccccccaagcccaaggacacccugaugaucagccgcaccccggaggucacgugcgugguggucgacgugucccaggaggaccccgaggugcaguucaacugguacgucgacggcguggaggugcacaacgccaagaccaagccccgggaggagcaguucaacagcaccuaccgcgucguguccgugcugaccguccuccaccaggacuggcugaacgggaaggaguacaagugcaaggugagcaacaagggccugcccuccagcaucgagaagacgaucuccaaggcgaaggggcagccgcgggagccccagguguacacccucccccccagccaggaggagaugaccaagaaccaggucucccugaccugccuggugaagggcuucuacccgagcgacaucgccguggagugggaguccaacggccagcccgagaacaacuacaagacgaccccccccguccucgacagcgacggguccuucuuccuguacagccgccugaccguggacaagucccgguggcaggagggcaacguguucagcugcuccgucaugcacgaggcccuccacaaccacuacacccagaagagccugagccuguccccggggaaguga

SEQ ID NO: 1804 - DNA, 42 bp, Artificial Sequence
  5'-UTR of human ribosomal protein Large 32 lacking the 5' terminal oligopyrimidine tract
ggcgctgcctacggaggtggcagccatctccttctcggcatc

1. Nucleic acid molecule comprising at least two modules,
wherein each module is a nucleic acid moiety,
wherein at least one module is an open reading frame (ORF) encoding a polypeptide or protein of interest,
and wherein at least one module is selected from (i) a further module encoding a polypeptide or protein element (coding module) and (ii) a module not encoding a polypeptide or protein element (non-coding module).

2. Nucleic acid molecule according to claim 1, wherein the nucleic acid molecule is a ribonucleic acid (RNA) molecule.

3. Nucleic acid molecule according to claim 2, wherein the RNA is messenger RNA (mRNA).

4. Nucleic acid molecule according to claim 1, which comprises a deoxyribonucleic acid (DNA) molecule that is complementary to the RNA of claim 2 or the mRNA of claim 3.

5. Nucleic acid molecule according to any one of the preceeding claims,
wherein at least one nucleic acid moiety, in addition to the nucleic acid moiety encoding the polypeptide or protein of interest, is a coding nucleic acid moiety (additional coding nucleic acid moiety),
so that the nucleic acid molecule encodes at least one additional polypeptide or protein element,
and wherein the at least one additional polypeptide or protein element is preferably encoded in the same reading frame as the polypeptide or protein of interest.

6. Nucleic acid molecule according to any one of the preceeding claims, wherein the open reading frame is or comprises a G/C-modified nucleic acid sequence.

7. Nucleic acid molecule according to any one of the preceeding claims, wherein the codon usage of the open reading frame is adapted.

8. Nucleic acid molecule according to any one of the preceeding claims,
wherein the polypeptide or protein of interest is selected from the group comprising therapeutic proteins, therapeutic polypeptides, allergens, autoimmune antigens, pathogenic antigens, and tumour antigens.

9. Nucleic acid molecule according to any one of claims 5-8,
wherein the at least one additional coding nucleic acid moiety encodes an additional polypeptide or protein element selected from the group comprising secretory signal peptide (SSP) elements, multimerization elements, virus like particle (VLP) forming elements, transmembrane elements, dendritic cell targeting elements, immunologic adjuvant elements, elements promoting antigen presentation, 2A peptides, and peptide linker elements.

10. Nucleic acid molecule according to claim 9, wherein the at least one additional polypeptide or protein element is a secretory signal peptide (SSP) element, which is preferably characterized by a polypeptide sequence selected from SEQ ID NOs. 1-1115 or 1726.

11. Nucleic acid molecule according to claim 9 or claim 10, wherein the at least one additional polypeptide or protein element is a multimerization element, which is preferably characterized by a polypeptide sequence selected from dimerization elements according to SEQ ID NOs. 1116-1120, trimerization elements according to SEQ ID NOs. 1121-1145, tetramerization elements according to SEQ ID NOs. 1146-1149, and oligomerization elements according to SEQ ID NOs. 1150-1167.

12. Nucleic acid molecule according to any one of claims 9-11, wherein the at least one additional polypeptide or protein element is a virus like particle (VLP) forming element, which is preferably characterized by a polypeptide sequence selected from SEQ ID NOs. 1168-1227.

13. Nucleic acid molecule according to any one of claims 9-12, wherein the at least one additional polypeptide or protein element is a transmembrane element, which is preferably characterized by a polypeptide sequence selected from SEQ ID NOs. 1228-1343.

14. Nucleic acid molecule according to any one of claims 9-13, wherein the at least one additional polypeptide or protein element is a dendritic cell targeting element, which is preferably characterized by a polypeptide sequence selected from SEQ ID NOs. 1344-1359.

15. Nucleic acid molecule according to any one of claims 9-14, wherein the at least one additional polypeptide or protein element is an immunological adjuvant element, which is preferably characterized by a polypeptide sequence selected from SEQ ID NOs. 1360-1421.

16. Nucleic acid molecule according to any one of claims 9-15, wherein the at least one additional polypeptide or protein element is an element promoting antigen presentation, which is preferably characterized by a polypeptide sequence selected from SEQ ID NOs. 1422-1433.

17. Nucleic acid molecule according to any one of claims 9-16, wherein the at least one additional polypeptide or protein element is a 2A peptide, which is preferably characterized by a polypeptide sequence selected from SEQ ID NOs. 1434-1508.

18. Nucleic acid molecule according to any one of claims 9-17, wherein the at least one additional polypeptide or protein element is a peptide linker element, which is preferably characterized by a polypeptide sequence selected from SEQ ID NOs. 1509-1565.

19. Nucleic acid molecule according to any one of claims 9-18, wherein the at least one additional polypeptide or protein element is an element that extends protein half-life, which is preferably characterized by a polypeptide sequence selected from SEQ ID NO. 1671-1727.

20. Nucleic acid molecule according to any one of the preceding claims, wherein the nucleic acid molecule comprises at least one chemical modification selected from a sugar modification, a backbone modification, a base modification, a lipid modification and/or a modification of the 5′-end of the nucleic acid molecule (preferably RNA).

21. Nucleic acid molecule according to any one of the preceeding claims, comprising at least one non-coding moiety, preferably selected from one or more untranslated regions (UTRs), one or more miRNA moieties, one or more IRES moieties, a histone stem loop, a 5′-Cap, a poly(C) sequence, a polyadenylation signal or a poly(A) sequence.

22. Nucleic acid molecule according to claim 21, comprising both a 5′-untranslated region (5′-UTR) and a 3′-untranslated region (3′-UTR).

23. Nucleic acid molecule according to any one of claims 21-22, comprising a 5′-UTR, which is optionally derived from the 5′-UTR of a TOP gene or from a fragment, homologue or variant of the 5′-UTR of a TOP gene.

24. Nucleic acid molecule according to any one of claims 21-23, comprising a 3′-UTR, wherein the 3′-UTR is preferably derived from a 3′-UTR of a gene selected from the group consisting of an albumin gene, an α-globin gene, a β-globin gene, a tyrosine hydroxylase gene, a lipoxygenase gene, and a collagen alpha gene.

25. Nucleic acid molecule according to any one of the preceding claims, wherein the nucleic acid molecule encodes at least 2, at least 3, at least 4, at least 5, at least 6, at least 7, at least 8, at least 9, or at least 10 polypeptide elements or protein elements, preferably encoded by a single open reading frame (ORF).

26. Method for preparing a nucleic acid molecule, comprising at least the step of combining at least two nucleic acid moieties (first module and second module), wherein each module is a nucleic acid moiety, and thereby preparing a nucleic acid molecule comprising said at least two modules.

27. Method according to claim 26, whereby at least one nucleic acid building block is altered by substitution or addition,
(i) wherein substitution is characterized in that one building block of the nucleic acid molecule is replaced by a different building block, prefereably selected from the following:
(i-a) a sugar building block of the nucleic acid molecule is replaced by a different sugar building block, or
(i-b) a backbone building block of the nucleic acid molecule is replaced by a different backbone building block, or
(i-c) a base building block of the nucleic acid molecule is replaced by a different base building block,
or
(ii) wherein adding is characterized in that
(ii-a) a lipid building block is added to the nucleic acid molecule, or
(ii-b) a 5′-Cap is added to the nucleic acid molecule,
preferably, wherein the at least one nucleic acid building block is substituted or added at the stage of preparing (synthesizing) the nucleic acid molecule.

28. Method according to claim 26 or claim 27, additionally comprising
(i) a step of designing a nucleic acid molecule having desired properties, or
(ii) a first step of designing a protein or polypeptide having desired properties, followed by a second step of deducing a nucleic acid sequence that encodes said protein or polypeptide, thereby designing a nucleic acid molecule encoding desired properties;
and wherein the designing of the nucleic acid molecule according to (i) or (ii) is followed by preparing the designed nucleic acid molecule, comprising the method steps defined in claim 26 or claim 27.

29. Method according to any one of claims 26-28, wherein the nucleic acid molecule resulting from the preparation is a nucleic acid molecule as defined in any one of claims 1-25.

30. Nucleic acid molecule obtainable by a method as defined in claims 26-29.

31. Vector comprising a nucleic acid molecule of any one of claim 1-25 or 30.

32. Cell comprising a nucleic acid molecule of any one of claim 1-26 or 30, or a vector according to claim 31.

33. Pharmaceutical composition comprising:
a nucleic acid molecule according to any one of claim 1-26 or 30, or a vector according to claim 31, or a cell according to claim 32,
and a pharmaceutically acceptable carrier.

34. Nucleic acid molecule according to any one of claim 1-25 or 30, vector according to claim 31, cell according to claim 31 or pharmaceutical composition according to claim 33 for use in a method of treatment of the human or animal body by therapy.

35. Nucleic acid molecule according to any one of claim 1-26 or 30, vector according to claim 31, cell according to claim 32 or pharmaceutical composition according to claim 33 for use in a method of gene therapy.

36. Nucleic acid molecule according to any one of claim 1-26 or 30, vector according to claim 31, cell according to claim 31 or pharmaceutical composition according to claim 33 for use in a method of genetic vaccination.

37. Polypeptide or protein encoded by the nucleic acid molecule of any one of claim 1-26 or 30.

38. Polypeptide or protein according to claim 37, wherein the polypeptide or protein is a fusion protein.

39. Apparatus for optimizing a nucleic acid molecule, preferably an RNA molecule, wherein the apparatus is capable of carrying out the method of claims 26 to 28
